United States Patent Application Publication US 2007/0020625 A1 - sequence listing, part 4

SEQ ID NO: 2907 - protein, 151 aa, Photorhabdus luminescens
LILLFLTSINSLRTGGIMENKKKIIHITVAAATFVLVSLGFFLTGENLVSLVNMDEKITFSSSVIIMLFFSPLIWYCMVSIILSNITNRCPKYHDSFIKYFGSIAIISLFLSFPTSLYVNYKLRSENYLICQKISLTSPNTYVKDMKLCDZ

SEQ ID NO: 2908 - protein, 180 aa, Photorhabdus luminescens
VNNLFVLKHICVMLQVWKITRRCIVPYGCYFYLLLAAAFLLTGCAQELTPKRVPTSSKIKASSTTKTLVHSSLPPESGGGDCRFTGNVQPSADNNSGKLAQCTRELEALKQFSGTKYTRYKAEFDRIARTGSQYLAVANGISEDINDLVRPKYQYALTSLCYRIKNDLSLALINQVDAQZ

SEQ ID NO: 2909 - protein, 169 aa, Photorhabdus luminescens
RCFPNTVSKSTVIASSPGWILQASLSTLTFIRTMDSNLSFALHTELIESKSNNALRTCNRLRRHKDGISPSRSGFRMVFIHASFTELPQFQQTSQPGLLLFTVQVPPLQPNTNFGRPPKSLMKISTGLLPIADALPPNTALPFGGIIIGLKPDTAVPFRLDDADAMVTZ

SEQ ID NO: 2910 - protein, 189 aa, Photorhabdus luminescens
MKLNKLVMVLGLGATLAAGSVNAAPEPSPKTKSTNQGHGKVTFEGSIIDAPCSIHPGDDDQTVKLGQISNKALAGGGKSTPVPFNIRLLDCDANGLEKRTVTATFSGTPSAVNKDLLAIVGSASGAAIGITNDNAKLIKLGQPSSPTIITDDSDSTMRFAAFLQGDGASTTIVPGDFTAVANFTLTYQZ

SEQ ID NO: 2911 - protein, 125 aa, Photorhabdus luminescens
MATINQLVRKPRSMKVAKSNVPALEACPQKRGVCTRVYTTTPKKPNSALRKVCRVRLTNGYEVSSYIGGEGHNLQEHSVILIRGGRVKDLPGVRYHTVRGALDCSGVKDRKQGRSKYGVKKPKAZ

SEQ ID NO: 2912 - protein, 157 aa, Photorhabdus luminescens
MPRRRVIGQRKILPDPKFGSELLAKFVNILMVDGKKSTAEAIVYSALETLAQRSGKEHLEAFELALDNVRPTVEVKSRRVGGSTYQVPVEVRPVRRNALAMRWIVEAARKRGDKSMALRLANELSDAAENKGTAVKKREDVHRMAEANKAFAHYRWZ

SEQ ID NO: 2913 - protein, 366 aa, Photorhabdus luminescens
MWIWEQPNWPKFHWNADTIAPLLRDVHFNQGLLLGKSDYEDTKQATLDSLLSSILYSSEIEGERLNAASIRSSLANRLGITEEKPYPIIEKSDGITEVALDVIENSHSDLTLERILRWHQLIFPEGYTMFNPIQGGKLRKGMIEVISGRLDKPTVHLEAPPPERMVDEMPQFIEWFNQSRTDASLDPIIRAAIVHLWFVTIHPLEDGNGRITRFLTDLALAQAENRSIRFYAMSVSICHHRKAYYELLENTQRGGLDITDWLVWFLKILNETLINKLQEINQVVQKAKFWQRIDQTQLTAEQTKVLNRMLDGHFEQGISSSQYQKVAKVSRATATRHLAHLVELNCLESTGAGGRSTRYVINHKGZ

SEQ ID NO: 2914 - protein, 182 aa, Photorhabdus luminescens
MSDSPKKRWYVIQAFSGFEGRVAQSLREHIKLHDMEDSFGEVMVPTEEVVEIRSGQRRKSERKFFPGYVLVQMIMNDATWHLVRSVPRVMGFIGGTSDRPAPISDKEVDAIMNRLQQVGDKPRPKTLFEPGEMVRVSDGPFADFNGVVEEVDYEKSRLKVSVSIFGRATPVELDFSQVEKAZ

SEQ ID NO: 2915 - protein, 143 aa, Photorhabdus luminescens
MAKKVQAYVKLQVAAGMANPSPPVGPALGQQGVNIMEFCKAFNAKTDSIEKGLPIPVVITVYSDRSFTFVTKTPPAAVLLKKAAGIKSGSGKPNKDKVGKVTSAQIREIAETKAADMTGASVDAMMRSIEGTARSMGLVVEGZ

SEQ ID NO: 2916 - protein, 169 aa, Photorhabdus luminescens
MALNLQDKQAIVAEVSEVAKGALSAVVADSRGVTVDKMTELRKAGREAGVYIRVVRNTLIRRAVEGTAYECLKEAFVGPTLIAFSNEHPGAAARLFKEFAKANPAFEIKAAAFEGEFIPAANIDRLATLPTYEEAIARLMSTMKEAVAGKLVRTLAALRELREQKEVAZ

SEQ ID NO: 2917 - protein, 162 aa, Photorhabdus luminescens
MDMKKMLNSADYSDTKNANKELVNGSFNEGYRGWRIPTPETVEILSENGVNFLSIQTYSSSGVIDQIITGLEPNVKYRLTGTARLSTQLTPQRALPAYFGLQNRTFGPESFVVNSFNFTTGSVELNTDEEGLLRIYMLKDQFVELPEEATADFTGFILERVZ

SEQ ID NO: 2918 - protein, 159 aa, Photorhabdus luminescens
MNVQEILNNEDYSDSKKNSHKELVNGSFEEGYNGWRIPAPESVEILSENGVHFIRIQSVTGSGVIDQIIEGLEPNTKYKLTGTARVSSEWASSAYFGLQSRTEGPNTFAVNSTDFTTGSVELSTDQEGLLRVYLLKDQVGPRPDGETADFTGFILEQAZ

SEQ ID NO: 2919 - protein, 197 aa, Photorhabdus luminescens
MLRNPIHLRLEKLESWQHLTFMASLCERMYPNYQMFCCQTAFAEPALYRRILDLVWEILVVKDAKVNFDNQLEKLEQIIPSADDYDIYGVYPAIDACIALGEIIHSRLSGETLEHAIAVSEISIRTVAMLEMTQAGKEMTDEELKILPAIEQEWDIQWEIYRLLVSCEERDIELIKGLKADLRESGTSNIGINLTQZ

SEQ ID NO: 2920 - protein, 161 aa, Photorhabdus luminescens
KITFSFSRAAYTTLFARRVKRLLRRFSARPHNVYQRCVGQWWRIIGNSLTLAIIILKKIDRLINSTAKLYFIPTYQQIYPHMASWMKIYRASRKRFRYNSVVKIIKRFYLTILKCYCSAHFLCPGIYPMDFKMHRDGKEANPREHSERCDRGERVQPTKRZ

SEQ ID NO: 2921 - protein, 165 aa, Photorhabdus luminescens
VQRCIELTSTNEPRGLTLQHRRCFGVGRQKREEFSACSEIDSGGCGGRATTAGRKPNMPGGDSAVVPPDPMPNSAVKRRSADGSVGSPHVRVGHCQALNTVETLSESWGFLHIRVCIILFAYIIWLPCLPRPVYPHYIGQLRRKSDLNVATRDGPQSERLKSCLZ

SEQ ID NO: 2922 - protein, 180 aa, Photorhabdus luminescens
MSDTQHSNHVFVLMGVSGSGKSAVASAVAYKLDSAFLDGDFLHPRSNINKMAEGYALNDEDREPWLKSLNHAIFAMQRTNPISLIVCSALKKHYRDILRDNNKNLSFLYMKGDFDLIKSRLKARKDHFFKSQMLVSQFEVLEEPGSDEQDVYLVDIRSSLDEVINHSIRIINSVISGEKZ

SEQ ID NO: 2923 - protein, 498 aa, Photorhabdus luminescens
MSDINLLQPVMAFLQHNHGHYINGQPVSGQGSETFSVINPATDEIIATVNQGGKAEVNAAMQAAQAAFHGVWAQTSPMERGHCLNRLADLLLAHREELAQLETLCSGKTIQLSRMLEIDSSAQFLRYFAGWSSKISGETLNVSLPSFKGEQYTAFTRREPIGVVVGIIPWNFSIMIAIWKMAAALTCGCTIVLKPSEYTPLTMLRVAELAKQAGIPDGVINVINGSGSVLGPALIGHPLCAKVTFTGSVPTGIAVGKSAMEQGLTRATLELGGKNGAAFLADMSVEKIVDGILEAGYLNQGQICAAAERFYIPASHMDDVLKLLSERLAAMKIGSPLDDSTEMGPLANKAHYDKILSLFEQARQEGSEIVYGGHALAGPGFFVAPTVIRANSPEDSLMKEETFGPVGTFLSYNDEEELIGLMNSTPFGLAASLWTNDLSKAMRMIPRIEAGTVWVNMHTFLDPALPFGGTKSSGIGREFGSAFIEHYTELKSVMVRYZ

SEQ ID NO: 2924 - protein, 181 aa, Photorhabdus luminescens
MEKEIFIFREVNVEDANNLIVFFNDLDNTSEFMLLEPEERKTSVEEQADIIKGFGKDRQMLICEDSKNIVGFIVISRGVFNRNRHLGSIVLGVKKEYRNKGIARTLLNKAQDWSRKNGVSRLELTVAIKNTLAIKLYLSSGFIFSGIRTSSLFINGELTDEYYMTKGISETVIDNVTNNRZ

SEQ ID NO: 2925 - protein, 162 aa, Photorhabdus luminescens
HLPVFSESFYYIRLFFNACFSFFWLKQHKFRCVIQIIKKNNEIVCIFYVNFSKNKDFFFHSEYHINEISVYSILLHTKINKISNDVGLINVEVTTSMVVMGITLRYTDFEFGDLLLILLIIDKEIKSKNMTNAQVIISIVSVSVLNTIKLINGETVEKIIRZ

SEQ ID NO: 2926 - protein, 177 aa, Photorhabdus luminescens
WIEEISHCSNKNFQMTERIELIELISGLDSYLENGYVNADSYEDPSDDAIDYLGELLLKDSECCLDFCKKILDSDLFNNNSVKSTALDFLILSESNWFEAFSYLLNKAEKLSTPELEKALFYFYCAKNDPKPYPVPEGLFNKLIERYQVLKTESDANFCHLHETYNDFIKAYSLKFZ

SEQ ID NO: 2927 - protein, 172 aa, Photorhabdus luminescens
MMNDMYLLAKKMELLDWGMIFLGAKGNPVGRLSAPNISEFACNELTKLDLSDSILVEVSEAAFCTEINREVIDSLEVICDKKNINIQLSERKWRYVALYILLLNELPDDYVYGLLKLNEFWNLWGDSVDSPNIVQGVGNNLSPTEYYSEENYHLLIEKHRNWLDREIKQLQZ

SEQ ID NO: 2928 - protein, 242 aa, Photorhabdus luminescens
KQNVSLTIRLKRSNNMSNKLIISSQVINTMEQSNDPWGIKDENSCLIYVNLALKSLHNVPNSFNYEGLFDDEIPWNGAEFAKEHVTQDKIVMEEKERICSLETHLFGKEQILSSYFCEKYPLYHEDGSCMGTIFHGWQVQDFSFTRLFYGKLPASILFQPPTDLFTQREWDVIFLLLHKYTSKQIGRMLNISYRTVETHISRIYKRIGLHSTRQLEDYCRTNDYDLYVPERFVHPESKMFPZ

SEQ ID NO: 2929 - protein, 435 aa, Photorhabdus luminescens
MNNHLDSLTYYAATKKYDLRFPALQEDLDVDVVIIGGGFSGINTALELAEKGITNIAILESRHLGYGSTGRNGGQVMAGIGHDLEVIKRHIGERGLETIFQISNLGAGIIRDRIAKYNIDADLCRGYGYLGMNKRQEKTLRSWLQDFKAVSPDEEIELYTGADVKKVIGSDAYTCVLKHMGGGHVHSLNLLLGEAKAATDLGVKLFENSQVLNIEYGPRVTVRTAMGSVRANKMLWACNAFLNSGLEPYIYKKVVNTYAFQLMTEVLPDDLIEKISPIRGAYSDIRPVIDYFRVTKENRLLFGSATPFIEHIPSDLKAWNRHLMLKVFPYLKDVKVELAWGGPLCCSANLFPQIGSLPQHNNVFYVQGYSGFGVTPSHIVCKVLAEGMSEGSERYDLMSSIPHANIIGKDKLRHLMVSAGKIWHQTSGYWKGRRZ

SEQ ID NO: 2930 - protein, 196 aa, Photorhabdus luminescens
MYANQACKHLQNISSSFDYEGLYDDEIPWGGAEFAKEYIIHDQKVMEKEERICLLLTHKFGKEQILSSYFFEKYPLYHEDGSCMGTMFHGWQVQDFSFTRLFHGKLPANIMFQPPTDLFTQREWDVIFLMLQKYTNKQIGIMLNISYRTVENHISRICKRIGLHSSRQLEEYCRTNDYDLYVPKRFVQPRSKMFPZ

SEQ ID NO: 2931 - protein, 200 aa, Photorhabdus luminescens
SVQGFDRKMNKVLSHKEELSHLTACLLSEVICSRTSFSWFKAIHRALKCPDRRFYFWWRIANYLYRTNKAKKISIRINRNLRNKYGCDLGLGCYIRKNLRISHYVGIVISRTCIIGDNFHVLQNTTIGVLNEDIQGKISIGNDVKIGANSCIISDNITIGDNVYIGAMSFINKDIPADCIAYTPKSQNEIKIKKQKIINZ

SEQ ID NO: 2932 - protein, 183 aa, Photorhabdus luminescens
MQLNIPTWLTLFRIALIPFFVLAFYLPFTWAPMVCAIIFIVAAATDWFDGFLARLWKQTTRFGAFLDPVADKIMVAAALVLVSEHYHTWWITLPAATMIAREIIISSLREWMAELGKRSSVAVSWMGKVKTTAQMAALIALLWRPNFEFELGGFILLYVATVMTFWSMFQYINAAWSDLREAZ

SEQ ID NO: 2933 - protein, 143 aa, Photorhabdus luminescens
MYKTILVPVDISEDELTSKAVKHALSLAKETGAKLHILHVLPISSAIVNAYSLGYDEIKDKATIKAEDDLKTLIDAIDFPADRLSYSIAFGSPRDEITAAATEINADLIVIGSRRPNITTHLLGSNASGVVKYSTTSVLVIRZ

SEQ ID NO: 2934 - protein, 146 aa, Photorhabdus luminescens
MYKTILVPVDISEDELTDKAIAHAEYLAKLSDANIHLFHAVPDISRFSISYSYHYDLLNSFAKKSIARSEEELAKVAEKIDLPKERVSFSVACGSPRDKVLSTADEIKADLIVVGSRRPNISTHLLGSNASGIVGYANISVLVVRZ

SEQ ID NO: 2935 - protein, 197 aa, Photorhabdus luminescens
VSNIKLIVGLANPGAEYAQTRHNAGAWYVDLLARSHNQSLKEESKFFGYTARINICGHDVRLLVPTTFMNLSGKSVVALASFYRIQPDEILVAHDELDLPPGVAKMKLGGSHGGHNGLKDIQNKFGNNPNFYRLRIGIGHPGDKNKVVGFVLGKPPASEQQLIDDAIDEARRCTDILMKQDMDKAINRLHSFKASVZ

SEQ ID NO: 2936 - protein, 195 aa, Photorhabdus luminescens
MFGYRSTLPKVRLITERMVVRLVYERDAYRLAEYYSENHEFLKPWEPTRDRSHCQPSGWINRLNLIIEMQRQSAAFHFLLLDSNESEVIGVANFSNILRGAFHACYLGYSLGEKWQGKGMMYEALQPAIRYMQRQQGMHRIMANYMPDNHRSGKLLERLGFEREGYAKKYLMINGVWQDHVLTALTDEKWSGKSZ

SEQ ID NO: 2937 - protein, 193 aa, Photorhabdus luminescens
MLKKTLLGLTAGALLLNASSALAANYKIDIPGQHAFIGFRIQHLGYSWLYGTFKDFDGSFTFDEQNPAENKVNVTIKIASLDTNHAERDKHLRSKDYFNTEKYPEAKFTSTEVKKEGEKYVVTGDLTLNGVTKPVILNAELMGEGKDPWGGYRAGFEASGKIKLKDFNFKADLGPKSQEADLLISIEGVREKZ

SEQ ID NO: 2938 - protein, 123 aa, Photorhabdus luminescens
MSDWSGSVPANAENGKSTGLILKQGDTISVVAHGWVKYGRDNVEWAAPDGPVPNNPQPSSIATLVAKIANKKFAIGNGVLHKTVPVDGELILLFNDVPGTFGDNSGEFQVEVIIESRYSPLKZ

SEQ ID NO: 2939 - protein, 252 aa, Photorhabdus luminescens
MDIHVDRLSTVIESVATSEFYPNLLTWLEQFITFDNAIVYAFEQGSPPRCLSKTEKKNSDAINQIYQQGAYLQDPFYQALIDGAGTDLFTLRELVPSGFYHTDYYLNFYRKTGWQDETGVLLKLSPQRQLGLFFGKENQPFFIQKPHWKNLKTVLEIIRSVARLHDDMTQQPPAAEMVCLDTQTRYALTPRECEIVELILQGKGSPQIAEKLFISTGTVKNHRKNIYQKLQIRSQAELFSLFMMPPVRYFAZ

SEQ ID NO: 2940 - protein, 174 aa, Photorhabdus luminescens
MAIILGIDPGSRVTGYGVIRQQGRHLSYLGSGCIRTKVDDLPNRLQRIYAGILEIITQFQPDAFAIEQVFMAKNADSALKLGQARGVAILAAVNQSIPVFEYAARQVKQTVVGTGAAEKSQVQHMVRSVLKLSANPQSDAADALAIAITHCHFNQNLLRVGDPRLILARGRLRZ

SEQ ID NO: 2941 - protein, 139 aa, Photorhabdus luminescens
MIYWLFLAMAIITEVIGTLSMKHASVSGGVVGMAVMYIMIATSYILLAMAVKKVALGVAYALWEGVGILFITVFSVMWFDESLSLMKVGGLALLITGIMLIKSGTRKAAVKKSAEVVKQMANKAVSVATTKSSKIKEAZ

SEQ ID NO: 2942 - protein, 157 aa, Photorhabdus luminescens
SQHLMARYASYEKFAEIIRYRFTNPQKTLEELFSRLVFNILCGNTDDHARNHAAFWDGKNLSLTPAYDICPQGRSGNEASQAMLIVENKNLSQLQTCLETAHNFNISEKKAKEIFNRQILIIQDNWNNICEEAELSEIDKKLFWHRQFLNPFSIIFZ

SEQ ID NO: 2943 - protein, 160 aa, Photorhabdus luminescens
SSSKHMRNIMTLEKISFAYPVHIRQGMLIDVMHPPSMWIYADSFPSVEYLNVALGVFLRKDELYYTKIDVFVDDKSVLDDQDKGNDTAYIHLSGFTSTDQYIMVSSMTLKRVHLPNEGVYKLIGELYSGELGSADSKVIYPMDFEMHRDGKGANPREHRZ

SEQ ID NO: 2944 - protein, 177 aa, Photorhabdus luminescens
MKAKLIISSLLASSVFISVANAADGKINFTGNIIANACKIDTDSANQNVNMGTISSNAFSGVDSTAAATPFSIKMSDCPPEYTHAQVKFDGQIDNRNNNLLALSNDKGQEVADGVAIGIYEEDNSTLIPLAKASKSQAFTDQKTAELKFIAKYVATAQAISPGSGDAVANFTIVYNZ

SEQ ID NO: 2945 - protein, 159 aa, Photorhabdus luminescens
MINTIRNILLAVIGGSLLTLMIYTNSMLSESTTPFFASWVAHGIGAIVALILFIIVSKLFSRKEIDESKHKKSNIPIWFYLGGIPGAFTVVLAAIAINGGLPLSSTISLGLVGQILFGLVADRFGFLGTRKRKIVIQDFYVIFFVLFGSILILFGGSNZ

SEQ ID NO: 2946 - protein, 147 aa, Photorhabdus luminescens
MNRDILDSGHSIKSSDQGDVESRGKISQLLDIWNVEQTNISDNQPLDFYVYDQQGEVVGGLVGRTSLGVLFISYFFLPEELRRQGLGSTLLKRAEKKATLRGCHMAVLFTMAIQAPDFYLKHGYSIFGEVSSLPDGNARIFMQKRLZ

SEQ ID NO: 2947 - protein, 317 aa, Photorhabdus luminescens
MTTKKIILDCDPGHDDAIAMLLAHGNPNIELLAVTTVVGNQTLDKVTRNALAIAHIAGITGVPFASGCHRPLVRDIETASDIHGESGLGGVKLPKHSRTLDPRHATDLIIDTIMSHPPKTVTLVPVGSLTNIALAVRKAPQIVERVKEVVLMGGGYHTGNRSAVAEFNIKTDPEAAHIVFNEKWPLTMVGLDLTHQARATPEITKAISRINTKVSRFVVELLDYYGQRYQERHGFNCPPIHDPCAVAYVIDPTVMTTQKVPVNIELNGTLTVGMTVADFRYPPTEDCHTQVAVKLDQQRFWQLIIDALKNIGDTCDZ

SEQ ID NO: 2948 - protein, 131 aa, Photorhabdus luminescens
MRTIVNAQTRDRRKSIQPPTTWLFNDNKFQLERRIARLETGMAWAEEPPSRTRHLLTNLVITETDLPDQFHVQSNYLLYRSQKERDEVFYVGKRLDCVRRNPKTDSWLICKREITLDQAVLTFHNLSVLFZ

SEQ ID NO: 2949 - protein, 152 aa, Photorhabdus luminescens; identical to SEQ ID NO: 2878

SEQ ID NO: 2950 - protein, 187 aa, Photorhabdus luminescens
MNILEQGKVAALYSAYSETEGSSWVGNLCCFSIDREHLPIIVNGRRFLIEFVIPDHLLDKTIKPRIFELDINKQFLLRRDHREINIYLLGEGNFMDRTTTDRKLFELNEDGSLFIKTLRHALGKYVSINPSTTQFIFFAQGKYSEFIMNALKEFEDDLSKRYRVRIITELQGPYYGFELDILSIIAZ

SEQ ID NO: 2951 - protein, 156 aa, Photorhabdus luminescens
CEKGPKAYSLDLYSSHHSSTVKYWRNIFSEFCVFSFRKRMWVYLEDWLPCRIYIIFLVLFSQYPTILPPACSMWSLATISNVKPDSGTPLLIIFCAICSFTLSHEACAASANGGRVKSSALNKSAFFIFIIITLYYGLMGIPVLLSKQRSVLGSQZ

SEQ ID NO: 2952 - protein, 165 aa, Photorhabdus luminescens
MVLHRASTQFMHYAQGFHMRLSIRTLSAFTSFAFLIAPFFTQAHSGNTAGINVEKLLETEKSWDGVSYQEYPKGTPQLSVLKITIAPNTSLAWHEHPIPNAAYVLSGVLTAEKKSSGEKRLMKAGEVLSEMVDSTHRGYTGKEGATLVVFYAGQKDIPLSKPVEZ

SEQ ID NO: 2953 - protein, 154 aa, Photorhabdus luminescens
MITSTFSDINLPAKRESEIAGKGLRELSAFLSTKLETQQISIISDDHKSHQIEVPTSALTMLVQILSELASGNAVQIVPVHAELTTQEAANILNVSRPHMVKLLEDGCLPFHKTGRHRRIRFADLMEYKKQRNTESMEAMKALANQAQELGIYZ

SEQ ID NO: 2954 - protein, 124 aa, Photorhabdus luminescens
MTVSPKPNLQLVYVSDIECSTVFYETIFNAKPVFSSPRYVAFAAGGEALFAIWSGGTTPDASTPRFSEIGIMLPSGEDVDRLFEEWQKKPDIKIVKEPHTEIFGRTFLVEDPDGHIIRVCPLDZ

SEQ ID NO: 2955 - protein, 157 aa, Photorhabdus luminescens
RNTNMFTSRLTMLHLLCESKRALYFFPIFLFLSSCSINLPPYEREARHYVYRSNDDFDPNFETHVNNSIKLMTPFFEQFYREGVKDRMNNISSHEFEKKINYFKSDNLIQEIGMSEIFISPKIHTKEINNSQISNKKKKALINGIINSYEAGYYGKZ

SEQ ID NO: 2956 - protein, 199 aa, Photorhabdus luminescens
MVKLRHCQLSPQAELVLQQHAAHEQNLSALNKEILWQDAVYYTIFMLPYTQALELALTFISCVYERDLMQGQRSLLQQVRHWRVDGGDPLRHELFEQAQTVGFDNPISCLALSVFWSEGSMTSPDLEAVYPQPWQSLAALADTLCLIFHLYGEQPERQMQYVEQFFQLAHGQLRQLPPSQDQGRKNYLHHEATLSGEQZ

SEQ ID NO: 2957 - protein, 165 aa, Photorhabdus luminescens
MSSSIFLQIDGIKGESTDSKHKEWIELEHVNFGLFNHARIADSGKRKITVGAADFRTIDCVKVMDSSSIGLLSAVAQGTAIKKVKLEICTIFKGEMHPYAEVEMDECIISDVHETCSRGGEFPQEQISIAYSKIKWTFTPLKEDGTKGTKVGPEGWDLIENKKQZ

SEQ ID NO: 2958 - protein, 330 aa, Photorhabdus luminescens
MSISLKLSIVVSIYNGMRFLPQFFVNLSRQKLANFELILVDDGSTDNSRQIIEQYAKKFPKIEIIAQKNQGVSVARNTGLVKARGDYVAFPDIDDVIYPGMYNRLLEIAQNNDLDIATCNGHYVYDDGRPARKIFPSDRLSSTAVLSGPEWLQQALSSRKFLHVTWLNIYKRAFLTKHHYQFEPGLHHQDIPWTTELLLTANRVQYIDESFYDYLIHAASVSHVPADDRIKVRTAHHYMKILEMLNKINQRYPQQVKQVPACHWQIAKEGLGILHTINEIESSTIKQQIVHELFERGIWSMIWKNARGFRLRWRLARRYPRLRAVLKAVZ

SEQ ID NO: 2959 - protein, 101 aa, Photorhabdus luminescens
MITVLSTETFDNWIDALKDIRVKTKIQARIRRLKNGNSGDIEPVGEGFSEMRIHEGKGYRVYLKNHGKVIVVLLCGGDKSTQQKDIARAKAIYKEIEGELZ

SEQ ID NO: 2960 - protein, 145 aa, Photorhabdus luminescens
MNHTRYETDVVAWANEQAALLRAGKFSEIDIANIAEEIEDVGKSEQRELASRMAVLIAHLLKWKYQPSHRGTSWERTIKAQRKEILYGLKESPSLKTKLNDSDWVDVVWSKAVASAMNETGLDVFPDVCIWGMSQILSPEFYPDZ

SEQ ID NO: 2961 - protein, 158 aa, Photorhabdus luminescens
RRMIMGILTGSDTPIPGKSYIIHPYPAGDYATAVTVASIFHAAPGSVSLAIWESTVPYQKFECVGDGKGRGYLGFICRASPVSDRGAYLGYNAHEILICKAQYQQKWEDMVVVERPAGGFEWCMRKDDHLAFVGIQGHIQLKIFRDFTTTWGFTEWFZ

SEQ ID NO: 2962 - protein, 149 aa, Photorhabdus luminescens
MRVFTPSHKVQSNPLWRTVGFPSSSGPHLNAILNEGLPVTIVDKIQNWSTFGKGDILRIAGIQIRSYSRRCSGKGKFTADESQRIARFVRVMDHAVDLFNGDKDKAAQWMKRPIRGLGYVTPESMLDTESGALDVMNLIGRIEHGIVSZ

SEQ ID NO: 2963 - protein, 157 aa, Photorhabdus luminescens
VILYRLTRSKYVESAWSGTGAKLYGGRWHNIGRPAVYVATSVSLAVLEVLVHVGDDELLTDFALLSIDIPENQIDILDIDTLPSDWNAPVPSTCTMEIGSEWFEVSHSIGLVVPSAIVPYENNVILNPMAKDFHKYINTVKRLDFGIDSRLVKAKKZ

SEQ ID NO: 2964 - protein, 134 aa, Photorhabdus luminescens
MPKSVQKIVNGWTRQLQAGRQSDMERGEIWLVSLDPTAGHEQQGTLPVLIVTPAAFNRVTRLPVVVPVTSGGNFVRTAGFAVSLDGAGTRTTGVVRCDQPRTIDMGARGGKRLERVPAKIMDDVLARLTVILSZ

SEQ ID NO: 2965 - protein, 155 aa, Photorhabdus luminescens
MQSMTIEQLRAASDAGGVEGVTLKGQGGTFLVQIATRSGAAAVLAKARSQEPRRFGNPIAALNVLRGVGITIGQFDASEWNPDEKEETAGNRGRAEAMRKAHQAAAYSEWLAAEIQDAIDDPRPNLSHDEVMAEMDADIAALAAEHKPAKRKRAZ

SEQ ID NO: 2966 - protein, 198 aa, Photorhabdus luminescens
ASPSASSTPVSGTRTRKKKPPAIVAGPRQCARPTKPPPTRSGWPPRFRMLSTTRARIFHTMRLWPRWTPILPPWPPNTSPPKGSALERGWLIYGEGKDPLPHRVATEGPRGFARHCSIHRQRQPDQGGQLRSGATRQDLAACAAPGAWPHRAARPAGLCARAGRASELHYFLSRAGRGAHRRNFASETRGAVNAVTWZ

SEQ ID NO: 2967 - protein, 194 aa, Photorhabdus luminescens
MTDYFLLFVGTVLVNNFVLVKFLGLCPFMGVSKKLETAIGMGFATTFVMTLASVCSWLVNTFILLPLDLIYLRTLSFILVIAVVVQFTELVVRKTSPTLYRLLGIFLPLITTNCAVLGVALLNINQSHDFLQSAIYGFGAAAGFSLVMVLFAAIRERLAVADVPAPFKGSSIGLITAGLMSLAFMGFSGLVKFZ

SEQ ID NO: 2968 - protein, 424 aa, Photorhabdus luminescens
KADNNVGFYRTLDFYLPLLEKESNIMKKQEKTTSRAIIAASMLTLITGCSHMEKIHMPEKNKPVLSTKLNIHQPTSIIVPVTISGKKYQFLLDTGASYTFIDNKLAKTLTQTTPESKIPVTFHRMLSDGLVTTSEKRLHKADLTLWQPLAITLGNHTVPSSDPWIGIDMSLFNQSIGQELDGILGIDTFRQLNWEINNLNHTLTVWRHAPSILNYQQCEPYSDSYGKSPAIQVSNVVFNIDTGADYSYVAQEFIEYLKKEHKDKISEGTSVKYASASGLDSSKEYLIDGFYLQQLPVGRLRIGENKSGLYNLGMSFFSRFDNYLFIPNKMLLCFNAKNFTRYDSPLLRTIAIRYFNNKVEIFYNDPKDIEKFGLKNGDIVLEVNGQQALPKDITYLRNQLSETPSGKLTIKIERDNTQKIITIZ

SEQ ID NO: 2969 - protein, 150 aa, Photorhabdus luminescens
MSVTTEQIAVDYPIPTYRFVVSVGDEQIPFNNVSGLDITYDVIEYKDGTGNHYKMPGQRQLINITLRKGVFPGDTKLFDWLNSIQLNQVEKKDVSISLTNEAGTEILMSWSVANAFPTSLTSPSFDATSNDIAVQEIKLTADRVMIQAAZ

SEQ ID NO: 2970 - protein, 159 aa, Photorhabdus luminescens
SKQGKNMHNLYTPSVSHRFIASFLFNSIPSPLDIAFQRISGLSRELQTTQHSQGGENARNIWLAEKIQHGSLMLERGVMIITPLTLIFDRVLRGEKAMYADVVIMLLNEHSLPVASWTVSNALPVRWSTSDFDANSNTVLVNSLELRYQDMRWLGVKAZ

SEQ ID NO: 2971 - protein, 139 aa, Photorhabdus luminescens
MSKQLIVDGDSLLFEPLFGNRQVTILGPAIIKGSGHAQIQGKKIAIVGDEKKVQLQAQYITSSHPTPGMGIVTIAQLDTSQQVNFCCSPDSVIIVGQQFTARFTPTQPAINPSGVPDITTPSMGKGRFIASQYAVSAGZ

SEQ ID NO: 2972 - protein, 157 aa, Photorhabdus luminescens
MLEKSLILIKPDAVHRGLVGKIITEFEEKGFKIHNIRSLVLNDEDFYFLYPKILGKPFHKQFKTVMQSAPSTLLVLSGHNALGSIFNFAGAYSNPEEDTTRSIRQKYSVWTGADVIHRAADSNEAMKQIAYFFDEVCEYRHNNEAFMAKEYWEPNVZ

SEQ ID NO: 2973 - protein, 160 aa, Photorhabdus luminescens
YNRWGLLVKTDADIAHRPHSRPGREYICKQPKLSNKQQKELGLIEKDPDVVGYVLFNTRSRRFATMDENEFGMVMYADDLEEAYLAPLRLDALMNIDFLPGSDQNDNDTRPSCCLNPLPKRQQPLANLTSSIHDKFFNLTCKKTTLSNSSTVSIAKIEIZ

SEQ ID NO: 2974 - protein, 160 aa, Photorhabdus luminescens
MSNTKEIRQPVPPFTRETAIQKVRLAEDGWNSRDPEKVSLAYSLDTHWRNRAEFVHSRKAAQDLLTRKWAKEHEYRLIKELWAFTDNRIAVRYAYEWHDDSGNWFRSYGNENWEFNEDGLMYNRYACINDLPIKESERKFHWPLGRRPDDHPGLSELGLZ

SEQ ID NO: 2975 - protein, 186 aa, Photorhabdus luminescens
LILFNNEEITMSTIDIFLLLDVDKIKKERKYSKKKNEPASLDKDHIHILLRNDDTFIEGNKETLTFSKSKGEILNWVTISLAGPESHYSVVMCGFQKHGPKEPMKNVYAHRYDNKRPTLNKSTSDSSSDKEICPAEFTPTLIPEYQWVWTLHETENTDYIIMFALYDKEQLMSYYKFSLFITTTDZ

SEQ ID NO: 2976 - protein, 316 aa, Photorhabdus luminescens
MEKRCMNSLTLSKVSLEELTLHQALSRHQQQFSWDNSHLTLDVISPPQTLDKVLIAHWQGQTFSFYCHAAELALWLAPDLQQADLTSLPQDLLLALLEYQSKMLPTLSWSALSTTSERRPLSACLRLRLERPGATLPLWLPEPSPLIAILPERQPRECLPIPLRLSLQWGAIILTLDVFRTLESGDVLLLPPQQQPDDPLLAYLEGRPWAYFKSHDHKLELITMHTLSPDSSDNTLPVTDLNDLEVHVSFEVGRQTLDLQTLTSLQPGSLLDLGVPSDGAVRILVNQKCLGSGRLVDIEGRLGVRVEHLSVEKQSZ

SEQ ID NO: 2977 - protein, 208 aa, Photorhabdus luminescens
GNVIVSELYKGMSQEAFENGYFYVTELRQFAKSLGIATSHLKKNELELHIRSCLFGYSGDLPIAIPNKRDRVGRDLLALESLVINYVSDKQTKNFLLEQVNRQYGPLADKSGQWYWLNYWRKAQIANNNKITYGDLVEHLASLKQQEGRLPQIPSARLNNFISDFIADPENKDKGKKQALEIWQALKEKNLPKTYLAYKQNKYQIEKZ

SEQ ID NO: 2978 - protein, 183 aa, Photorhabdus luminescens
MKFTPFGVDIAKHLMQIHFVDEYTGELTDKQLRRPDFLTFFSNREPCLIGMEACGGAHYWARELRKLGHDVRLLQAKFVKAFRMGNKNDVQDARAIWLAVQQPGKSLAIKNEEQQAILSLHRMRHQLVKFRTAQINALHGLLLEFGETVHKGRASLDKAMLSDSEKNWLRSCLLCLKSNIIVZ

SEQ ID NO: 2979 - protein, 127 aa, Photorhabdus luminescens
MKIPGVGVLIATAAIATMGDPSAFRSGREFSAYLGLVPKQTGTGGRVKLLGISKRGDTYLRTLFIHGARVTTLLTKTPLPWVTALKKRRPVCVAIVGMANKLARTVWALVAHQQEYQKDYVSVRPYZ

SEQ ID NO: 2980 - protein, 199 aa, Photorhabdus luminescens
MTINDSQHQKRQQRLKEKVDFRIEAAQLERGILIVFTGNGKGKTTAAFGTVTRAIGHGFRAGVIQFIKGKWENGEKNLLEQHGVNFHVMATGFTWETQSRETDTVACQQVWHHALEMLSDPDLDLIVLDELTYMVSYGYLPLEEVITALNHRPEHQSVIITGRGCHRELLEMADTVTEMRPVKHAFDAGIKAQKGIDWZ

SEQ ID NO: 2981 - protein, 193 aa, Photorhabdus luminescens
MANILLLDNVDSFTYNLVDQLRNHGHQVVIYRNTVATEMIMQQLRMLSSPLLMLSPGPGKPSDSGCMPQLLQQIIGKIPVIGICLGHQAIIEAYGGKISAADEILHGKASLAKHDNQAMFANLENPLPVARYHSLTGSRIPSELTISARCGDTVMAVRHDKHKVCGFQFHPESILTTHGAKLLEQTLVWALNZ

SEQ ID NO: 2982 - protein, 171 aa, Photorhabdus luminescens; identical to SEQ ID NO: 2510

SEQ ID NO: 2983 - protein, 184 aa, Photorhabdus luminescens
MNALELLLNRRSVSRLTTPAPQGEALQHILAAGMRAPDHGALRPWHFIVMQDDGIERFSRLLHQAAIDSQLGAEAEEKAKSAPYRAPLIIAVIAKVVENSKIPEWEQVVSASCAVHAMQMAAVAQGFGGIWRTGSWTDDNTVRTGLGCHEHDKIVGFLYLGTPALKAPNKVTAPDMTNFVSYLZ

SEQ ID NO: 2984 - protein, 137 aa, Photorhabdus luminescens
MAKHPEVSLYKELTDIQRHVTQNAGTEPPFSGKLLHNKKSGVYHCLCCEQPLFMSGTKFDSGCGWPSFYQPATHDAVQYLDDDSHNMHRIEVRCGHCNAHLGHVFPDGPQPTGERFCINSAALSFTDENTGEKTVGZ

SEQ ID NO: 2985 - protein, 170 aa, Photorhabdus luminescens
MMRFLNHCSQGRSAWLLMILTALILESSALYFQHVMKLQPCVMCIYERVALFGVLSAGILGVIAPKTPLRWLAIILWIYSAWGGLQLAWQHTMMQLHPSPFNTCDFFVNFPSWLALNQWLPSVFEATGDCSVRQWQFLTLEMPQWLVGIFAAYLVVAALVLISQFFSRKZ

SEQ ID NO: 2986 - protein, 160 aa, Photorhabdus luminescens
MANMIYVTIKGESQGLISQGCSTLDSIGNRYQHGHENQIMVLQFNHGLTVAQNVNYQPVNFIKLLDKSSPLLMIAAANHERLELTFDIYRTSQIGSQELFYSILLTGAKICDLNVNCPHVINDNNGQPEEVISVQYVNITCRHHMAGTSGYCIWDEMVYZ

SEQ ID NO: 2987 - protein, 330 aa, Photorhabdus luminescens
MIHNITILAVPDVQLLDVSGPLDVFAEANRILHRQVYSLSVMSTGSDIITSSSGVRLMADVILSDTTSHSADTFLVAGAPDAHSHTLSEQECSAIIEMCHRSQRYGSVCTGALLLAQTGLLKQRRVTTHWECAELLAMRFPEIIVEPDMLYVADGSVRTAAGVTSGLDLALRLVEEDLGREIAMEVAASLVMFFRRPVCQGHFIRRSQLSLSGRAAFQDLQRWAQANLQGISGLQDMATHMNLSIRHLGRLFRQELNMKAGVWLEHARIEKARTLLEEGRLPLKAIPGACGYRSSDVMRRAFVKNTGITPSVYRKIFIQTQQSGTNEENZ

SEQ ID NO: 2988 - protein, 153 aa, Photorhabdus luminescens
ENCGIYCRFFYRKLTMSILDLIMTKCLFLSLLFLVISIAIYKINQKKMDKIIELYIEEGFYLPTGITIQRFGRMRDQFQVVMFFYRLLTGKKMKINQPDSKYMHQESYNFIQNLPFSLTHWMKICIITTYIGAAFSLISTIIILIQKYYFSCZ

SEQ ID NO: 2989 - protein, 157 aa, Photorhabdus luminescens
LAMLWIREDYGIFRRSIYRAFIMKILDLITIISVIFLFFFFIISITIYKINQSKMDKIIESYIGKGLYLSAGVKLGRFLGVYGQYQVAIFFYMLLTGRRMRINEKDRKYMYQESYNFIQNLPSSLTHWIKIYFITINISGVFFFITMITFLFREYAZ

SEQ ID NO: 2990 - protein, 157 aa, Photorhabdus luminescens
MFKHFLVSAVAVASLSGCVNTDSLSGDTYTAGQAKQVQTVSYGTVVSVRPINIQAGSNENVLGAIGGAVLGGLVGNTIGGGSGNTLATAAGAIAGGVAGQNVQGALNTTKGVELEIRRDSGESIIVVQKQGKTAFHKGQRVRIAGQGSNITVSPRQZ

SEQ ID NO: 2991 - protein, 138 aa, Photorhabdus luminescens
MRLLHTMIRVGDLQRSINFYTEVLGMRLLRTSENTEYKYSLAFVGYADESEGAVIELTYNWGVDHYEMGNAFGHIALGVDDVAATCESIHKAGGSITREAGPVKGGTTIIAFVEDPDGYKIELIENKNASNALGNSIZ

SEQ ID NO: 2992 - protein, 99 aa, Photorhabdus luminescens
LYMKGSPKLPNCGFSAQAVQALSACGERFAYVDILQNPDIRAELPKYANWPTFPQLWVEGELIGGCDIIIEMYQRGELQTLIKETADKCRSQGENATEZ

SEQ ID NO: 2993 - protein, 127 aa, Photorhabdus luminescens
VRSTMTNSVETFSLNETAWQGITITARAAAQILKLMQQNPQSKGLYLGVKQSGCAGFGYVFEMVNDPAPDDLRYENEGACLYVPLKAMPFIDGTEVDFVREGLNQIFKFNNPKAQHACGCGESFGIZ

SEQ ID NO: 2994 - protein, 137 aa, Photorhabdus luminescens
VSSIQIAPEIARDNVHVIIVDDKGAPRDFLLDNSDGGYQGSGSLIALILAHLNSKKVTIRTTGYEYNKHGYINGVLIKEDKGGGGTGGGTGGGTGGGTGGGTGGGTGGGTGGGTGGGAGGGTGGGAKGSAGGGSGGZ

SEQ ID NO: 2995 - protein, 152 aa, Photorhabdus luminescens
MLVRKSLLALFATTSLTAAGIAYAGPPVTVTFKHLGASGSADAVYTIITNNESGTYANATPKPSASVAPGGVNSYQVQSPLSPDVNYAMVRYKIGGKTCEFMTTFVNGYVNGVKIPKWNKGATPSGGAVCNATITYTNYFTYAWSVEFTMKZ

SEQ ID NO: 2996 - protein, 266 aa, Photorhabdus luminescens
LNVRHSQYGDVVNHCSTEVLFNLSVLNHRYKLIQDGCHVFYADLHLINRRQHMNFSINGVSIPDTQITRDATTFIRDTESDLLFHHSSRVYYWGALAGQRLGLNVDHELLYVGCMFHDIGLTHEHCSCDKRFEVDGANAAKHFLQGYGIAQADIDKVWTAIALHTTPGIPEFMVPEIALVTAGVEMDVLGINYEAFSDSERTAVVQHHPRTDGFKEDIIQAFYDGIKDKSQTMFGGFNVDVIQDKQPGLVPLNYCNVIRNSRWKGZ

SEQ ID NO: 2997 - protein, 167 aa, Photorhabdus luminescens
KFRRYTARDQNVYLSSRNRKLSGIGVMAMKLKKIFGIGGALLLTIFSQTVPAASGSYHSSVVLPTLYSKNFLETVNVPIVGSPPATGKINNVSWTWNVVGWPQNLSVYLCQGDTSSCIDISRTRRMSTDAFNKRSPAQQFLFALKVGNGNVMPIAGQTGEITVSWQZ

SEQ ID NO: 2998 - protein, 181 aa, Photorhabdus luminescens
MSVIIKEITQQHGRKAFDCGVSELNKFLQQQARQKTVKHISKTYVACRDSVPTIIIGYHTLTGYSVTTPLAYRDYKKYPHPLSAVKLARLAVDCSHQGQRIGEQLLIDAIYRTVLVAQQVSAIGLFVDPMTSEVIPFYQQYGFLPADPNDNSRLEMWLPIKTCIEVTSTFKISQNCRLSCZ

SEQ ID NO: 2999 - protein, 162 aa, Photorhabdus luminescens
MIIRIKELLLLFSLLLIGCSSHAPRTPAPVLKTALSDPIMVIAQLKEQLNQWRGTPYHYGGMDRRGVDCSGFVYRTFSDRFDIQLPRTTGGQIKLGTRIDKSDLMPGDLVFFRTASGEHGLHVGIYDANNQFIHASTHKGVTRSSMNNVYWKKAFWQARRIZ

SEQ ID NO: 3000 - protein, 177 aa, Photorhabdus luminescens
PGRNVTTRRAVIGMSSPVLGLRPGRWFLSRKSKLPNPDNFTCSPFSKERRTSSKNNSTRSLASRLLIPSFSNRFSDISALVSAISSVPQGCLESLFQHCNTFINRRSNLFFFQCTRGILQDKTYSKALMTLCYTFTTIHVKQVYANYMIYANFLAFSQNIFYSNIFRHHDRNITTVZ

SEQ ID NO: 3001 - protein, 181 aa, Photorhabdus luminescens
GIKGGKRIQPARPNRINEEIRATEVRLTGSDGEQIGIVSLGKALEKAKEEGVDLVEISPNAEPPVCRLMDYGKFLYEKSKSTKEQKKKQKVTKVKEVKFRPGTEEGDYQVKIGNLKRFLENSDKAKVTLRFRGREMAHQQIGIEMLDKVRNDLDGLAVVESFPSKIEGRQMVMVLAPKKKZ

SEQ ID NO: 3002 - protein, 181 aa, Photorhabdus luminescens
MTYQKAGYIAIIKRVLGWMIFVPALLSTIVSVINLAWLHGIKGDGINAVLDDFLKMMAEVVRFNTPFLDFFWKNSPTPDRLAGFTGSTLGFLIIYFLIFFGLAMNASGQRIYRQVKFIRENIEDQLIIEKAKGNDSLTREQIELKIKLPRHTLFSQIYILYISPVIIGAIFYFLLKILGWZ

SEQ ID NO: 3003 - protein, 183 aa, Photorhabdus luminescens
MTAEGHLLFSVASIILAHKLEITPEIANGDWLHMLPGVLLTALLPDIDHPNSTLGRLFRFISIPIAKLCGHRGFTHSLLALILGITLFWLKIPEEWLIPTDFFHAMIVGYLSHLIADMLTPAGVPLLWPIKIRFCLPVLGKQGNKKAERFISALLIVIAVFLPEDIESSILFYINRIKDLYFZ

SEQ ID NO: 3004 - protein, 267 aa, Photorhabdus luminescens
KTVSGEESLCLLAVGECVKMPAILIFSSRELVARFATFGPLFQLIMMKKNNSSPKTLSEKVTDIIRQKLIIGELSPGQRLSEAALSEQLEISRNTLREVFRVLTQEGLLRYEPNRGVFVATPSIASIIDIYRIRRLIECQALAQSYPMHPAVEHMRGAIEMAKRCRDTQDWIGVGTANMAFHSAIVELTDSERLITFYGHISAELRLAFGYLNDPELFYVPYIDQNAHILALLEKGEPESAASELKSYLEQSERTVLAAYTRKNRTZ

SEQ ID NO: 3005 - protein, 166 aa, Photorhabdus luminescens
MNKNEFYRELTGDLKALLSGEYDLIATLANASALLYERLHDVNWVGFYLIDGNTLVLGPFQGKVACVRIPVGKGVCGTAVLEKRIQRVDDVHAFPGHIACDVASNAEIVLPLIVSDRIIGVLDIDSTVFNRFDEKDEFGLQALIDGLCAHLEQCVVPKYVELNVTZ

SEQ ID NO: 3006 - protein, 118 aa, Photorhabdus luminescens
LVTIMKRLLLLLSLFCLSFQNVAAPIETVSKLQFGDKWAFTREEVMLDCRANKALFVINPSTLVQYPLNDIATDMMKVGKVNAKSLDIILLADSKNPTQKMSIEPFQQAALALCDKRZ

SEQ ID NO: 3007 - protein, 168 aa, Photorhabdus luminescens
MLNQEVVNKLNEQMNLEFYSANLYLQMSAWCSEQGLPGAAAFFKSHSQEEMQHMHRLFEYLSDTGTMPRLGQIDAPSADYESISHVLNRTYDHERFITAEINKLAHLAITTQDYSTFNFLQWYVAEQHEEEKLFKSILDKLDMVGEDGKALFLLDKDLKGLAAANPVZ

SEQ ID NO: 3008 - protein, 188 aa, Photorhabdus luminescens
MISLSDFVNRFQLQLPPPPKRLSDNNRHAAVLLPIICKPKPTLLLTRRSATLRSHAGQVAFPGGVADPKDKSIIATALREAEEEVNIPHQKVQVLGQLAPLNSSGGYLVTPIVGLLPPGLSLHSNPAEVAKIFEVPLSEALSLSSYHYLDVSRRGQQHRVYFYWYQQHLIWGLTATIIHQLAQQVQVZ

SEQ ID NO: 3009 - protein, 153 aa, Photorhabdus luminescens
MNLNDIALTGLIVLMLAFAVYDEFVVNFLKGKTHLQIKLKRKHKIDALIFIILILIVVYNNITVYGSRLTTYLLLFTILVTIYIAYIRSPKLFFKNNGFFYANTFISYSRIKTMNLSEDGILVIGLENKKLYISVSQIDDLERIYKFLIENRZ

SEQ ID NO: 3010 - protein, 154 aa, Photorhabdus luminescens
LKSMSHLDPTLLVLLVLAALGIISHNMTVTLAMLLLLVIRITPLNHFFPWVEKYGLTIGVLILTVGVMAPIASGKITVQAVLNSFMNWKSLLAIVIGVLVSWLGSRGVSLMSNQPSTVAGLLVGTVLGVALFKGVPVGPLIAAGILSLLIGKSZ

SEQ ID NO: 3011 - protein, 181 aa, Photorhabdus luminescens
RSDSSLYRIIFRNGSSMNNIVGLNPDFKVILMNVAMLVLIALVFLPVPYWLSNSNPNKLAASIATTLFIIIALFVGYQLLSNKAVAKEGKLLMKSGVYSHEWVISSLRREAGVSLEDFSRSNGIHIIHYSSGYYHKGKNKYFILRVSKRPLICFNSEGNIGLCIDESIFEKIKGELQDKIZ

SEQ ID NO: 3012 - protein, 239 aa, Photorhabdus luminescens
VNLWPLIGIAVIVVGFLLRFNPVLVVIVAGIITGLAAHMPITAILEKLGSGFLNTRNLPLILLLPLATIGLLERHGLKERAQTWISNIKTATAGRLLIIYLFIREITAALGLTSLGGHPQMVRPLLAPMVEGATENRHHDLPDDIRYRLRAMSAATDNVGLFFGEDIFVAFGAIIFMHNFMLESGGIQTEPLHIAMWGIPTAICAFLIHAFRLSRLDHQIATKLAALNGMDKNRSKVEZ

SEQ ID NO: 3013 - protein, 182 aa, Photorhabdus luminescens
LPQSEQHFLVITALGADRSGIVNTITRLVSECGCNIEDSRLAMFGEEFTFIMLLSGSWNAITMIESSLPQKGAELDLLIVMKRTKCDTHTTFPATVSVKVDVDDSSGIVEQFTNLFTTQDFNIAELVSKTHPPEGNIPARLQIQITAHSLLEDDGIIIKQAFNKLCTDLNAQGSISILEPLZ

SEQ ID NO: 3014 - protein, 157 aa, Photorhabdus luminescens
MNPLKAGDKAPQFSLPDQDGETINLSDFEGQRVLVYFYPKAMTPGCTVQACGLRDEMDTLKDSGVEVLGISTDSPSKLSRFVEKEMLNFTLLSDEDHQVAEQFGVWGKKQFMGKTYDGIHRISFLIDTNGNIEHVFDKFKTSDHHQIVVDYLKLHPZ

SEQ ID NO: 3015 - protein, 188 aa, Photorhabdus luminescens
VVLIPHLLGYVPLEREDLPFVHQLDNNASVMRYWFEEPYEAFVELCDLYDKHIHDQSERRFIIASSDAKVGLVELVEIDYIHRRSEFQIIIDPTYQGQGHATKAAKLAMEYAFSVLNLYKLYLIVDKENVKAIHIYNKLGFYTEGELIDEFFINGSYRTAIRMCVFQHQYFASKEDEKMSQQLLTRRZ

SEQ ID NO: 3016 - protein, 130 aa, Photorhabdus luminescens
LLMPQDNHLALVCALSKWIENHLGRVIHLEELATYSGYSLWHMQKIFKEVTGISLGKYIRQRRLAGAVHLLRNSALPIFDIALDFGFGSQSHFTYMFRKEYGITPYDFRQNPEIELEVKLPLHFTTHCSZ

SEQ ID NO: 3017 - protein, 157 aa, Photorhabdus luminescens
LMIFAIALFATLAAFGNITDYATNFAFVQHVLMMDTIFPDTTITYRAIHSPLLHHIGYIVIISLETLTAVLCWIGGIHLLVNLKSNAAVFNKKKSIAIVGLTLGFLTWQVAFMSIGGEWFGMWMSKQWDGVSSAFRFFITIILVLIYLIQYDKEQEZ

SEQ ID NO: 3018 - protein, 195 aa, Photorhabdus luminescens
MTIQYITRKGSFDSAHRVMNERVKCFNIHGHTYLYELTFSFEQMQPIGYAIDFKEIKRIGAAWIDEFLDHASILNPKDADFISAVHATRSKFRLMSLNRHGEYCNPTVENIAKEIFLTMEVLFNEWDNLKIHHIRLYETPNCFTDCNAESIHEEERSAFLSQRFEELKAYSQAMGRFEYDSRNVVTSDSTHERLZ

SEQ ID NO: 3019 - protein, 181 aa, Photorhabdus luminescens
MKHEKVIAAVAIGSNLSQPYYNLLTAENHLLALKESTNFRFSPIYKTAPIDSTGAPDYLNAVVVFETSLTPVVLLTELLSIETLNGRKRSFVNAPRTLDLDLLLYGDKVISTENLIVPHPRFHKRFFVLTPLNDLLPETQHPLLKASINELEQRLQTLYEKEKYISHFDQTFRSVSTNIHZ

SEQ ID NO: 3020 - protein, 157 aa, Photorhabdus luminescens
VNGRRLILFSPHITVACIVHAQNKFLVVEETINGKALWNQPAGHLEAGETLLQAAERELWEEAGIQAKPQALLKVHQWVAPDGTPFIRFLFLVEMEQQTVPHPQDRDIDCCHWVTAEQIFSSHYLRSPLVAESIRCYLQNEKHPLTLLDSYVSPFIZ

SEQ ID NO: 3021 - protein, 201 aa, Photorhabdus luminescens
NCDLIMNLYFYTSNSKKYTYAESIFSSHADINLVHKSFDFKELQTNDPQENLLFKLNQVPHVPSSYVFIEDSTFHINALNGFPSLYTKYILSSLGVQGIINLLAEKGNRECYFINHLALRTENNKVVFFSGTTRGLSISLSPLERSNETSWSDLWQILKVTDGGQFYSQLIEGDKHLFNQQNNNTDAFQLLRDHLTEIELZ

SEQ ID NO: 3022 - protein, 339 aa, Photorhabdus luminescens
MFQQQYLYWLAGVILLAVATMSWRDHTNPRRLTTSLFWALYGIVFLVGDWTYRLIALWADSEAEAQKMLHIGVGLIVVLMALTAGFGGVRLGSYHQRTPQQRQESASRLGNRLFLPALAIPIVTVIGVLLFNHIPELQQALFGSGNHATLVTLFSMTVGCLVGYGVALKMTRENVTQSTQEARRLLDSIGWAFILPQILATLGLLFTVAGVGTAISHLTEHYLAVDNRLIAVATYILGMALLTMIMGNAFAAFPIVTAGIGIPILVLQHGGNPAVMAAIGMFSGYCGTLMTPMAANFNIVPAALLELPNRNAVIKAQIPTGIALLIANVFLLYFLMFLZ

SEQ ID NO: 3023 - protein, 175 aa, Photorhabdus luminescens
MQKVKLPLTIDALRAAQKRLDYAGSYSPEQVLRIAESVVSVDNDVDSVLSFQIDNQRLAVVRGHSDVDVTLECQRCGGNFSHHVHITYCFSPVVNDEQVEALPEEYEPIDVNEFGEIDLLAMIEDEIILSLPVVPVHDSEHCEVSEADMVFGELPLEAEKPNPFAVLASLKKSTZ

SEQ ID NO: 3024 - protein, 173 aa, Photorhabdus luminescens
PLGRCCKPKAFRNISAIFIVIDNFQPFAFTVSFRDELHATTTQYQCIFELQCGFQHIVGIDQHLLATVATPRCNIIFCIAMRAEFKTKAELTLTAFAILIVFPTLTAAAKVLNNFTVGGAFSPKYISEVTDRAEYLNRLALFIRFIAANFWCVEIVRISCIIENQAIFFAGKZ

SEQ ID NO: 3025 - protein, 144 aa, Photorhabdus luminescens
LKLPESQVLDADGETDVSDMQSFITVNRVTSELMGEEYKFNAKKEIEIITVTRETIVSINAFGKNAYLIIEKLASVLSTSYAQTLFKRLGAGIVRKSQVRNLPTAIAGGKEQRAQIDLTLSHIHRIETSVNQAKTVDITVYEDZ

SEQ ID NO: 3026 - protein, 162 aa, Photorhabdus luminescens
MAFGFTDWDAETGTIKPGSIKRASSSNDKVWGEENRTEIALPYGTFVAVNPEGGVKPITSASDVIHGIVVRDIYGDAAPHNKQVNVGHFSHGDCVGALAVEKDTFTRGDKVYIVATGKDVGKVTSTAKGNIDLGYWAEEVSAGNHCVAITLGYIHTQKVGEZ

SEQ ID NO: 3027 - protein, 150 aa, Photorhabdus luminescens
MKFNASYYTILALIVISLTAYYYHSELQREQRVTKQQQEDIQQLTDTINYQNAHITMLNELDVKHTKELANAKSEIDVLRNDVAAGHRRLRIAATCNQGEAGSSSRLDDAASPRLNPAAEQDYFDLRKMIVENEQQTKALQDYIRAECQZ

SEQ ID NO: 3028 - protein, 137 aa, Photorhabdus luminescens
MLGVITDKINWTSSFLLILLGSTIAIIGDYYTVFAGLLITAIATMKIMFSFEVTSERANKQSARYLMLYNTSHLIISDEELLNRLVNIQEDDNRPWASLAYPAMLQASQVLGRPTDIQLTWYEKLMAFLADSVPVRZ

SEQ ID NO: 3029 - protein, 169 aa, Photorhabdus luminescens
KQWVISNLAGEVMTKQSKIHDVEIIPNHDTKGHIFIQAYDKGIDFITKCAQERDNATIILYLKMIKDMDKETGALMVDVSTLISQTGLSKSAVYRSIKTLKESGMIRSRYSKVYEINPDGFWKGKRELRDTALFFAESNRARNVKYRLNPASAATDSFTVPATFEEETZ

SEQ ID NO: 3030 - protein, 190 aa, Photorhabdus luminescens
QRAAITQISRGQRIILHNNPFHCDVDRQTPIFPMPSASYHPFFPMGVHRRPQNPLTRFSPPKAGFSRRALVSVAPFSATGERRPTRLGGGCPFCGRGRHRARKRRPCDALRHCGFGLRMTLHDHAVLFCSGKPPGAARGGDGEHGNEQGACDCEPGAASAAGLGRGEVNERRPQADLPSGLLAGRWHGSZ

SEQ ID NO: 3031 - protein, 221 aa, Photorhabdus luminescens
MKTVLITAFEPFDGEAINPSWESVRQLQNQQLSGAHIETRQLPCVFNTSLTCLYAAIDEIQPELVIAVGQAGGRPDITVERIAININDARIPDNQGNQPIDTPIVATGPAAYFSTLPIKAIVSGLQTAGVPASISQSAGTYICNHVMYGLLHHLALTYPKVRGGLVRGGFIHIPYLPEQAVKHPGTPSMALETITMALKIAINQALENSGDIAISGGMTHZ

SEQ ID NO: 3032 - protein, 182 aa, Photorhabdus luminescens
LITLTGKPVRVNSVSHFFTKGVNPMSTMTTKEHIRSPSQSLSVQALAEPEIFKKTRSRFNQWLQAQFDNHYHTLRNHGYRCFLARHHPTELERYDEACEALRREEFHRFSELQTLGLFLYQQVQLKEKKLRQRRRWLLTGIALTSLVTGVYLILHAYEVDLSAVYHELTALPARIAHYFMRZ

SEQ ID NO: 3033 - protein, 198 aa, Photorhabdus luminescens
MQKVVLATGNPGKVRELAQLLADFGLDIVAQTELGVDSAEETGLTFIENAILKARHAAQVTGLPAIADDSGLSVDILGGAPGIYSARYAGENATDQQNLEKLLDTMKDIPDDQRQAQFNCVLVYIRHAEDPTPLVFHGRWPGFIAHKSAGNGGFGYDPIFYIPELGCTAAELTGEQKNAVSHRGQALKMMLDTLRNAZ

SEQ ID NO: 3034 - protein, 183 aa, Photorhabdus luminescens
MQFLTFILFTVLDLYIAVLLLRVWMQWARCDFYNPFAQFIVKMTQPIIRPLRRVIPSIGSLDTASIVIAYVLVLFKLIMQLWFSTGTVAFLTLFIPIGLIELLTATGKLVFWLVLARALLSWISQGRNPIDYVLMQLTEPLMAPIRRIIPTMGGLDFSAMIVILILYALNYLRADVLSWLIQZ

SEQ ID NO: 3035 - protein, 199 aa, Photorhabdus luminescens
MEHFISLFVRAVFIENMALAFFLGMCTFLAVSKNVTTAFGLGIAVTVVLGISVPANNLVYNLVLRDGALVEGVDLSFLNFITFIGVIAALVQILEMILDRYFPSLYNALGIFLPLITVNCAIFGGVSFMAQRDYNFSESIVYGFGSGIGWMLAIVLLASIREKMKYADVPAGLKGLGITFVTTGLMALGFMSFSGVQLZ

SEQ ID NO: 3036 - protein, 154 aa, Photorhabdus luminescens
KILSYVINTIVFNFFITGGVMINKKKIMHIIGAFSFIILTLFTFFSSGENLISLVKMEDKIIFSGPVFMLFFAFPFLSYFIVSVIFLNIKNRWPKHHDSFINCFGVIAIVSFFLSFPLSFYVDYKLKSENYLICEKISWRSPNTYVKNIKLCDZ

SEQ ID NO: 3037 - protein, 174 aa, Photorhabdus luminescens
IFMFYNFQCVWSLPTANQRWANLPYPLCAKIKCPVWAVVGLTVISMSHPSRFRHSIILRSDRLEKSPRNRWDTFAWLIPIRSPAVVCVSPRRLIDLMISKAKPDLILCFSASRKPRSANTLPELISTATPLMVFSFIFHLLGHHSGHFQSITDDVHIFFRRRYAVLTLLLKGMZ

SEQ ID NO: 3038 - protein, 127 aa, Photorhabdus luminescens
MEQQSEKLLVWIGSSKKDLLNLPKDVQRFFGFALDFAQRGEKHDAVKVMKGFGGAGVLEVLEDDIGGTYRAVYTVKFDEAVFVLHAFQKKSKHGIATPKEDMDIIRNRLKVAAVMAQEMKNERENHZ

SEQ ID NO: 3039 - protein, 188 aa, Photorhabdus luminescens
MKLSHYPWLLEPNEGRKQFVSDDIAIKIVSEDWERRQYYRLREMTFRDEQKILQEDRDEYDVKALGIVAIEKMLGAHDRVIGAVRIFPDGEQTWYGGRLCVEPLYRRRHIIGKALINTAVSTAKHLGCRTFLATVQSQNEHYFQRLCWDSLRQLTIANIPHVLMQAQIENYPLPHVPMQAYMQKETQZ

SEQ ID NO: 3040 - protein, 161 aa, Photorhabdus luminescens
MPKIDIEQYKDGDFLVDYEEKVFEDVKALPGEKALVTFHTVAFEGSAGLVNVLQAKRLLRKGFETKILLYGPGVQLGVQRGFPTLGAEAFPGHLAVNNQLKAFMEEGGEVYACRFALQAFYGQTEKALIPGIRPINPLDVMDLRLLMRRDNALVIDTWTAZ

SEQ ID NO: 3041 - protein, 259 aa, Photorhabdus luminescens
LIGVTTMNMIDLNSDLGEGFGQWKMGDDNTMLSIVTSANVACGFHAGDPAGIFQTLKSAHKNQVVIGAHVSYPDLVGFGRRNMDVSSNELIADVIYQIGALKGLAVAAGTTVSYVKPHGALYNTIAHNEYQALAVITAIREVDDNLVLVGLAGSKLLDLAQENGLRTVAEAFADRAYTPQGTLVSRREKGSVLHDANLVARRMLQLVTEGGVEAIDGSFTRIQADSICVHGDSPDAVEMARQVKLTLQQAGITVRSFIZ

SEQ ID NO: 3042 - protein, 167 aa, Photorhabdus luminescens
MPKINSSAQQFYFEHHDWLYNWLRRKVPCPCHAEDLTQDTFLNVLSNSNLSDIRQPRSFLATVARCLVANYYRRKKNEESYLEYINSTPEMTMPSAESRIATFEQLEKLEITLDKLPVQVKSAFLLAQLQGLRYSEIADQLQVSSSSVKQYLQRAHNKCKKIQILTZ

SEQ ID NO: 3043 - protein, 154 aa, Photorhabdus luminescens
MSEKYVVTWDMLQIHARKLAQRLLPVEQWKGIIAVSRGGLVPGALLARELGIRHVDTVCISSYDHNNQRELKVLKKAEGDGEGFIVVDDLVDTGGTAQAIREIYPKAHFVTIFAKPAGQPLVDDYIVDIPQDTWIEQPWDMGVVFVPPICEGRZ

SEQ ID NO: 3044 - protein, 175 aa, Photorhabdus luminescens
VNQILFIVGARGAGKTTVGKLLANELSYTFIDTDHHIQQTSNMTIADIVNQQGWQQFRQLESQALQQVTQINRVISTGGGIILSAENRQYMRQNGTVIYLQASASILAERLMQQPESTQRPSLTGKSIVEEMEEVLAARENLYCECANHIINAHLSPEKITTYVKEIMFSGIVSZ

SEQ ID NO: 3045 - protein, 172 aa, Photorhabdus luminescens
MPLLDSFTVDHTRMNAPAVRVAKTMKTPHGDTITVFDLRFCIPNKQVMPEKGIHTLEHLFAGFMRNHLNGEGVEIIDISPMGCRTGFYMSLIGEPAEVRVADAWKAAMADVLKVKDQSQIPELNIYQCGTYHMHSLTEAQDIAHHILDSDVLVNKNDELALPEEKLTELKVZ

SEQ ID NO: 3046 - protein, 186 aa, Photorhabdus luminescens
VVTMSKQTCIELPVNPIVLGKLGSTYGIRGWLRVFSSTEHAEDIFAYQPWFIQRAGRWQHIELEAWKHHNQDMIIKIKGIDDLDAANSLTNCEIIVDSEQLPELDTGDYYWKDLIGCQVISTAGYNLGTVNDMMETGSNDVMVVKANLKDAFGVKERLIPFLDGQVIKKVDLATKTIEVDWDPGFZ

SEQ ID NO: 3047 - protein, 149 aa, Photorhabdus luminescens
MTTLTIEQEYEIVSKHLSRMSVLRRFAQTKDVEWLEDVYKALEIVVQDSKETFRLMSLEAEQKEQKRLEILRLIEETGLNLKTINIPITLSDFKPKKSNAGKGKTRKPKYQFNENGEVKYWSGNGKKPSGLQKLLNEGHSLNEFLIKKZ

SEQ ID NO: 3048 - protein, 176 aa, Photorhabdus luminescens
MESSFTPTEELLNIRAAQQAKLNKDIPYQEILLTRLSMHVQSKLLENRNNMLKAQGINETLFMALMILDTKESHSIQPSELSAALGSSRTNATRIADELEKQEWIERKESHNDRRCLHLHLTEQGTKFLNSLLPPQHECLRRLWSCLDQEEQKQLEKLMRKLLVRLDTMGDCIKKZ

SEQ ID NO: 3049 - protein, 571 aa, Photorhabdus luminescens
QPRRGGNGTSGETNPATSWDHRTLLYLNTQGCLVRFLPVNLDAIIVELHDLNETLALFDSLNAHPIPGVEEIIPAARTLLIRFRPNVVSTVKLAGNINGRNLNTLDRTTGKLVEIPVYYTGEDLEEVAEILSITTQEVIQRHTESEYTVAFTGFAPGFAYLVAESDRLHVPRRTTPRARIPAGSVGLAGEFSGIYPQATPGGWQIIGITPERMWDLSRSPSSLLQPGFRVRFRDQRKGAAISITKAEIPVAPIEDVLPSQVDKHASLEILTTGIQTLFQDLGRSGQASLGISAAGALDKTALRSANRIAGNPSDNACLEIVQGGLSFISHGNVIIAVTGADCPITVQTTSGRKFQVDGYQPIDLSEGDKVTLGTPKAGMRSYLAVRGSFAKQPILSSLSYDTLAHVGPKPIAIGDILDILTVTQGCAVSMDESPAFNMPTTDDIVTLDIILGPRTDWFTAEALSLLQNQLWQVTPQSNRVGIRLYGDTPLSRLNHKELPSEGTTTGAIQVPASGQPVLFLADHPLTGGYPVIGSVANYHLDLAGQIPVNARIRFNPITEFHEIKESDCRLZ

SEQ ID NO: 3050 - protein, 156 aa, Photorhabdus luminescens
VVMYHHYFDTPKGFPKPYIHITADDKGVTSLYFVDEKTAPEVKNDITKQCVKELRGYFAGKRTEFSVPLNPAGTEFQQRVWLQLCKIPFGEVWSYKQLSLALGSVNYCRAVGMANSRNPISLIVPCHRVIGHDGKLVGYTGGLNIKSWLLEHEKTZ

SEQ ID NO: 3051 - protein, 125 aa, Photorhabdus luminescens
MINIILAIFIGGGLGSVLRWFISLRLNNISSNIAIGTLTVNCIGALIIGLGLAYFNKSTHLDPAWKLMLTTGFCGGLTTFSTFSVEVVYLLLDGKLGWALGTVLLNLFGSLLMTMLAFVLMHELZ

SEQ ID NO: 3052 - protein, 157 aa, Photorhabdus luminescens
LKLQLIAVGTKMPDWIQAGFTDYLRRFPKDMPFDLIEIPAGKRGKNADIKRILEKEGEQMLAAVSKGSRIVTLDIPGSRWETPQLAQQLEHWKRDGRDVSLLIGGPEGLAPACKAAAEQSWSLSPLTLPHPLVRVLVAESLYRAWSITTNHPYHREZ

SEQ ID NO: 3053 - protein, 183 aa, Photorhabdus luminescens
VRHRILTLLLGLAVLVTAGCGFHLRGTTQVPAELKKLQITSSDPYGPLARSVRQQLRLNNVTILEDGSADVPVLKLIDSSENKDTVSVFQDGKAAERQLTLNVNAQVIMPDGSVYPLRSRVDRSFFDNPLEALAKDAENEIINQEMREQAARRLVRQLLTVHNAEKQKAREKQVGQQAAQAQZ

SEQ ID NO: 3054 - protein, 156 aa, Photorhabdus luminescens
MSSVILDLQIACEHSQGLPKETLFQHWLDGVLPQFQSESEVTIRIVDEAESHDLNLTYRGKNKPTNVLSFPFEAPPEIDLPLLGDLIICRQVVEKEAEEQQKTIEEHWAHMVVHGCLHLLGYDHIEDDEAEEMESLETEIMQKLGYADPYLAEKEZ

SEQ ID NO: 3055 - protein, 150 aa, Photorhabdus luminescens
VKKTFFSSGDFGKVPGELIEDKPTQLIHENVLNSEVSQDLNFSNERRHKVAMVNLPSKVLSMTLGGLQPGQSTRKHRHSYETIIYIVNGEGYSLIGEQHISWKAGDAIYVPVWAWHQHVNSSAINEVFYIACENAPMLQNLGLAVREELZ

SEQ ID NO: 3056 - protein, 177 aa, Photorhabdus luminescens
MAIIGIFFGSDTGNTENIAKKIQKILGSDIAEVHDIAKSSKEDIEQFDILLLGIPTWYYGEAQCDWDDFFPTLEEIDFEGKLVALFGCGDQEDYAEYFCDAMGTIRDIIEPRGAIIVGHWPTEGYHFEESKGLADDSHFIGLAIDEDRQPELTEERVNAWTKQIYEELSLSEILAGZ

SEQ ID NO: 3057 - protein, 154 aa, Photorhabdus luminescens
MAIIHQPAKLNTAEIQAMIGGVMLLSQYSPLHRRYLVSEWQQRILPAFELNQFCYYADGQGHPIAFCNWAFLSEQNRDELLSGERELIHTDWRSGPHIFFPEMIAPFGHGREVARDLRRRVFLPWKGQKACTVRGKLDVQNNRCIRQVQWFFVZ

SEQ ID NO: 3058 - protein, 593 aa, Photorhabdus luminescens
MTMNIKNYPIKKVLIANRGEIAVRIIRACRDYGLQSIAVYADSDINAQHVRLADEAYSLGGNRPADTYLNIPQLLDIAKRSGADMVHPGYGFLAERAEFARAVIHAGLIWVGPEPETIDTLGDKVKARKIAQQVGAPQVSGTEEPVKNAEEALAFAEQYGLPIAIKAAYGGGGRGMKVAWRLDEVTELYNSAVREATAAFGRGECFIEQFLDKPRHIEAQILADKHGNVVVLGTRDCSLQRRNQKLVEEAPAPFLAEHQRQRIHQAAQDICTAAGYIGAGTVEFLLSADGTISFLEVNTRLQVEHPVTEETTGIDIVVEQFRIAEGKPLSLTSTPIPLGHSFEFRINAEDAGKGFLPTPGTVTVFSPPSGPGIRLDSGVAAGSTIPDTFDSLMAKLIVTGATRQQAIARAQRALQEFSIKGVASVLPFHRAVMEHPDFISDDTFNVHTRWIETDFINDIKISPRQENHYQEKVTRTFIEINGRRHELGLPAELLKGLSLPDSGRNSIIENKNSEMERTITAPNPVSAPISGVLQSWYVQEGDEVKQGDVIAVMEAMKMETQLTAHRSGKIVIYVEEGGYQQAGNVLASINDDZ

SEQ ID NO: 3059 - protein, 146 aa, Photorhabdus luminescens
MSFREVLIVGWQYLRAFVLIYLCLLTGNAISSLLPIIIPGSIIGMLILFVLLAFQLIPAHWAKPGCSLLLKNMTLLFLPIGVGVMNYYDQLSQQIIPIVFSCLISTAIVMIIVAYSSHYVHRERPIVGSTSEINNEQQKQEKQEKZ

SEQ ID NO: 3060 - protein, 103 aa, Photorhabdus luminescens
MSFEKEFDRASPYLYKAVATGQTLQSANIKWYRIDNAGQEEEYFHILMSGVKIVSISPVMHNIKDPSYQHLNHLESVEIRYEKITWKYLDGNIIYSDSWKERZ

SEQ ID NO: 3061 - protein, 164 aa, Photorhabdus luminescens
LSSNEIFNRLTTLLDNHHASYRVMEHSTAGHSEEVAKIRGTQLGQGAKGLVCHVKGEGFRQYVLAVLPADQQADLSSLAKQIGGNRASLASPKEVFELTQCVFGAIPPFSFHPDLKLVADPLLFERFDELAFNAGSLERSVILNTQDYHRIAQPELMIFRRVEZ

SEQ ID NO: 3062 - protein, 171 aa, Photorhabdus luminescens
MSSLVIPDLSVLREWLDQLKISYFECDSCQALHLPHMQNIDGLFDAKIDLLDNVILFSALAEVKPTAIIPLMANLSQINASSLTIKAFLDIQDENLPKLVVCQSFLVSAGLTFSQFSHFLQQSEEQIAGVIFEIHSNNLLYINRDIEIEGDIEEEEESQAPVKAPTFTLHZ

SEQ ID NO: 3063 - protein, 165 aa, Photorhabdus luminescens
MIDNKKRPGKDLDRIDRNILNELQKDGRISNVELSKRVGLSPTPCLERVRRLERQGFITGYTALLNPHYLDASLLVFVEITLNRGAPDVFEQFNAAVQKLEEIQECHLVSGDFDYLLKTRVPDMSAYRKLLGETLLRLPGVNDTRTYVVMEEVKQSNRLVIKTRZ

SEQ ID NO: 3064 - protein, 151 aa, Photorhabdus luminescens
FLMNLIIKLLQIEHNEICCIHQFINNWTIAADKSISVKTSMNTFGMTGSEPVTYKFSLKNGFTTRCSNPATGCVHKMTIGCCFFYQFFNGHVFAAVGIPCVAVMAIETTHQATLKENNKPDTGAINGATGFERVDTTKYGHNRFTPKLAGZ

SEQ ID NO: 3065 - protein, 168 aa, Photorhabdus luminescens
MSSTMFDVMQLNEEHDRDSFYSGSEFLDGYFQRQVGQDVRCRVAACFVALHDHRVAGYYTLAAAGIQLANLPTATIKKLPRYPTVPAVRMGRLAVDQAFRNQGLGGALLADAIERTIRAEIASYALLVDAKDDNAVQFYRHHGFIALPDSPFTLFLPLIAVDKKGKKZ

SEQ ID NO: 3066 - protein, 164 aa, Photorhabdus luminescens
MTNKALANKASADKVLADIYGRGWAFPPQFSIKDSTYKDSTHPEIPTGVTMAEGAENVRQNMKILFLTEPGERIMRENYGCGLNDYLFANIRDEMMAEIQTRIEERVLRYEPRADISEIQVNQRTDLPNTLHIQVTYTLRGSEISQQIEGVLEVNEGRVQVSLZ

SEQ ID NO: 3067 - protein, 218 aa, Photorhabdus luminescens
MIQLPDELDLIIGLALLALLPFIAVMATSFLKLAVVFSLLRNALGVQQIPPNMAMYGLAIILTIYVMAPVGFATQDYLRQNEVSFSNAQSVDKFVEEGLTPYRNFLKQHIKPSERTFFIDSTRQIWPSQYADRLEPDSLLILLPAFTVSELTRAFEIGFLLYLPFIAIDLIISNILLAMGMMMVSPMTISLPFKLLLFVLLDGWTRLTHGLVISYGDZ

SEQ ID NO: 3068 - protein, 409 aa, Photorhabdus luminescens
VITNDYELMTAPNSVPVKMWTHGVPVEAEAREQLLNTAKMPFIFRHLAVMPDVHLGKGSTIGSVIPTRGAIIPAAVGVDIGCGMMAVRTSLNAKDLPDNLYAIRHAIEIAVPHGRTANRSGQDKGAWQQPPETVDHHWSVLQTGFKQLTDKYPQLLKTNNHLHLGTLGTGNHFIELCLDESDRVWVMLHSGSRGVGNAIGNLFITLAQQDMKQHIAHLPDRNLAYFEEGSRHFADYMEAVGWAQNFARHNREVMMQHTLAALATVITKPFTATMEAVNCHHNYVQQEQHFGQNVLVTRKGAVAAHRGVMGIIPGSMGAKSFIVRGLGNKESFCSCSHGAGRVLSRTAAKKRFTIEDQKRATAHVECRKDSDVIDEIPMAYKDIEAVMAAQSSLVEIVHTLRQVVCVKGZ

SEQ ID NO: 3069 - protein, 153 aa, Photorhabdus luminescens
MNNLYTPSVSHRFIASFLFNNIPSPLDIAFQRISGLSRELQTSQHSQGGENARNTWLAEKIQHGSLVLERGVMTVTPLTLTFDRVLRGEKAVYADVVIILLNEHSVPVASWTLSNALPVHWSTGDFDANSNTVLVNTLELRYQDMRWLGVKAZ

SEQ ID NO: 3070 - protein, 149 aa, Photorhabdus luminescens
MTNKILADIYGRGWTFPPQFFVKDNSHPKIQTGVTMAEGAENVRQSMKILFLTEPGERIMREDYGCGLNDYLFANINDELIAEIKTRIEERVLRYEPRAEITVIQVDQRTDLLNTLHVQVTYALRGSDINQQLEGVLEVNEGRVQVNLZ

SEQ ID NO: 3071 - protein, 153 aa, Photorhabdus luminescens
MSNLYTPSVSHRFIASFLFNNIPSPFDIAFQRISGLSRELQTTQHSQGGENARNTWLAEKIQHGSLLLERGVMTVTPLTLVFDRVLRGEKAVYADVVIMLLNEHSLPTASWTLSNALPVRWSTSDFDANSNTVLVNSLELRYQDMRWLGVKVZ

SEQ ID NO: 3072 - protein, 164 aa, Photorhabdus luminescens
MTNKALANKVLTNKVLADIYGRGWAFPLQFSIKDSTYKDSAHPEIPTGVTMAEGAENVRQNMKILFLTEPGERIMRENYGCGLNDYLFANIRDEMMAEIQTRIEERVLRYEPRADISEIQVNQRTDLPNTLHIQVTYTLRGSEISQQIEGALEVNEGRVQVSLZ

SEQ ID NO: 3073 - protein, 167 aa, Photorhabdus luminescens
LIPAPGSAIKQGQNMNNLYTPSVSHRFIASFLFNNIPSPLDIAFQRISGLSRELQTSQHSQGGENARNTWLAEKIQHGSLVLERGVMTVTPLTLTFDRVLRGEKAVYADVVIILLNEHSIPVASWTLSNALPVRWSTGDLDANSNTVLVNALELRYQDMRWLGVKAZ

SEQ ID NO: 3074 - protein, 174 aa, Photorhabdus luminescens
  misc_feature (145)..(145): Xaa can be any naturally occurring amino acid
GDLSKIHEKIKKVLKKEDTEPLELIGVTVEGIIEEMKKTDEKYGQYEYKDEDITSYPIAWTNPDNGKIYIGINSPEYSHLNNKGESELNLAKIISTIIHESLHASSHQHKGLQSQTDTGADNLNYDEYVTDYFAREFYKQILPDXDYVPNCFTKGLGGENKIWGGNIVEFMIQZ

SEQ ID NO: 3075 - protein, 277 aa, Photorhabdus luminescens
MKEKFGISDIMKQHICQKLAQLETELQIRILYACESGSRGWGFASTSSDYDVRFIYVHAPSWYLRVDPSRDVIELPISNELDICGWELRKTLGLLKRANPTLMEWADSPVIYYEDVEFMAALRALLPDYFSNNRARYHYLSMAKKNFRSYLKGEKIRLKKYLYVLRPLLAVRWIEAGKGVPPMRFDSLLAGTVTDAGLMQEIQTLLAIKRNTDETEYSPRFKRIHNFICRELDDSVTRRELKDKKHLPDTELDLLLMRTVLHHNNKEEGEYLLKNGZ

SEQ ID NO: 3076 - protein, 168 aa, Photorhabdus luminescens
LILVPVPYLAKQGQNMHNLYTPSVSHRFIASFLFNNIPSPLDIAFQRISGLSRELQTTQYSQGGENARNVWLAEKIQHGSLHLERGVMTVTPLTLMFDRVLRGEKAVYADVVIMLLNENSVPVASWTLSNALPVRWSTGDFDANSNAVLVNSLELRYQDMRWLGVKVZ

SEQ ID NO: 3077 - protein, 175 aa, Photorhabdus luminescens
MWPLAIVSVVVVFFMQLIFGQLLHEVRVQSVRARTDVAALFRSYASAGVQLLDHHAQGKVRRRNMQQALTTLHMEWVNTDAWCDNFSSQCLWGGFISGAHVYIFRKNISAGDNVLLHGAFAELLRWGAEPDQIGFKRGSWLIDGKGKRIENQLARRLPGDVREFVSDGALVEILZ

SEQ ID NO: 3078 - protein, 181 aa, Photorhabdus luminescens
MQKISQFMISLLMVPVFSLAYAQVSSTERSAIQAKPVAQKPVLSEVTANNSVAAQLEKLQTDLMLLRAETARANAQAELDKISRIVNRGSAVNNDLPLVKSIFGRNGGLIATLRFRLGGIMDVKAGDWLPNGYKVIRINTGVVTFAKQGRCYDVGLTATNDASLLDSLDFMVAPPLPLSRZ

SEQ ID NO: 3079 - protein, 157 aa, Photorhabdus luminescens
VMSPCQPIDRQIIENLTGGRLAEADARTLLLNSKVRLIFNILEAQRPGVQGVVGFVGLTRYHRAVQLGVVTDINLIAALTGKQPGLLLHAVIVAVEFIAAGIEARGTIGEGAYGGTDAGAGILLLAVIALAILLAAEGQMTFHLGGNLFAADLSAFZ

SEQ ID NO: 3080 - protein, 142 aa, Photorhabdus luminescens
MTVERTFSIIKPNAVKKNAIGAIYARFESAGFKIIAAKMLHLTREQAEGFYAEHKGRPFFDGLVEFMTSGPIVVQVLEGENAVQRHRDLMGATNPDNALAGTLRADYADSFTENAVHGSDAVESANREIAYFFTEDEICPRZ

SEQ ID NO: 3081 - protein, 134 aa, Photorhabdus luminescens
MMVVAVVAVMLLAGCANQPTNGNQQRKVAAETRIQLGMAYLAKGNLPAARYHFDKVLLAKPDHYQAQLGMALYEQYSGQPEAARQRYKMAMQYAPGNDTVLYHYSVFLCEQGQYEEVKTLFTGSYADRRVCYQZ

SEQ ID NO: 3082 - protein, 144 aa, Photorhabdus luminescens
MEIRVFRQDDFEEVITLWERCDLLNPGVDPEVDIERKLTHDPDLFLVAEVVGEVVGTIMGGYDGHRGSAYYLGVHPEFRGRGIANALIARLEKKLIARGCPKIVLIVPEDNDATIYMCEKLEYEDRHQESVIFSKRLIVDQEYZ

SEQ ID NO: 3083 - protein, 139 aa, Photorhabdus luminescens
MKKIFITTALITLFSMPSMAQASQTQFGGFSGPDSTQPPVQAVPQGGFIDQNARVSTTQQVKNMRDDSWVVLEGHIESRIHSDHFIFRDNAGIVEVEVDHKYWNGQTITPQDRVRLEGEVDKEWNGMTVDVKKVTKLNZ

SEQ ID NO: 3084 - protein, 389 aa, Photorhabdus luminescens
MLQIPTTPRHDWKVRAKEFGFGFHTIDNEPYWTEDRYYQFTLKQIEEHIEDPTAEIHRLSLQAVEHVVNSDELMARFQIPEAMWSLVRGSWKRRDPSLYSRLDFAYDGKNPAKLLEINSDTPTSVYEHGFFSWLWLEDKVNRGELPHAADQFNLLQELLVNRFCELKPFLPFNTLHFACCKGTEEDKGSVDYMADCAKDAGIHIEFVYIEDIGLSECGQFTDSNNKIIDSMFKLYPWEFMFREEYAQHLVTAGVNWFEPMWKCLTSNKAILPLLWEMFPGHPNLLEAYFADDPKAKRLTHYVMKPIFSREGANISIHKDGKVIEKVEGPYGEEGYIVQQYTPLPKIGNSHVLIGSWLVNDTPAGLSVREDIGRITKDTSRFVPHIILGZ

SEQ ID NO: 3085 - protein, 170 aa, Photorhabdus luminescens
MGLFDKLKSLVSDDKKNSGTIEIIAPLSGEIVNIEDVPDVVFAEKIVGDGIAIKPAGNKIVAPVDGTIGKIFETNHAFSIESDSGIELFVHFGIDTVELKGEGFKRIAEEGQRVQKGDLVLEFDLKFLEERAKSTLTPVVISNMDEIKELSKLSGSVTVGETPIMRIKKZ

SEQ ID NO: 3086 - protein, 197 aa, Photorhabdus luminescens
SISLTRRGSSVRIWYRPPSRCDKNDFMIGRLAQLVEHLPYKEGVISSNLVSPTNHKFSGIEAVIVIMKWAISSVGRASPLQGGGHQFESGIAHHFIKIVSGGITYLWCGSLAQSVEQLTFNQLVAGSNPARPTTPKDIQSSSPIDGSLAQSVEQLTFNQLVAGSNPARPTTPKDIQNSSPYRWVVSSAGRVRTVGFZ

SEQ ID NO: 3087 - protein, 175 aa, Photorhabdus luminescens
MKTIEVDEDLYRYIASHTQHIGESASDILRRMLKFNAEQPVQNVQPLSAVEKAPVARQRDSVRVIRELLLSDDYSDKKKSVERFMLILSTLYSLNSESFSQTTDTMHGRTRVYFAGDGQTLLASGKQTKPRHIPGTPFWVITNTNTDRKRNMVEQIMQDMKFSANFIDKVCGTIZ

SEQ ID NO: 3088 - protein, 194 aa, Photorhabdus luminescens
MIWLRSSVVLLIFLTLITGVAYPLLATGLSELMFPYQAQGSMVKQDGQTVGSELIGQPFTKAIYFQGRPSATVDYPYNTLSSGGSNLATTNPILDDEIKRRVEQLRQFNRQPDIPVPVDLVTASASGLDPHISPAAADFQAQRVADARHLPIKVIKQLIRDNIEHPPSEFLGEPVINVLKLNLALDNLPEKKQZ

SEQ ID NO: 3089 - protein, 153 aa, Photorhabdus luminescens
ARKNDVILCTMLFSQNTCELTIIGGKMKALTVILLILITNVSGCVSKKHAFSIDYKANGETFHLTPLCIEEIFPEKGDNYYSIFIKVKNNSHCSKPFNLFIKQNVGKKLSVFFNNKPILKNTNIITPMHVENGFYQAIDSNITFEEIVNSLNZ

SEQ ID NO: 3090 - protein, 155 aa, Photorhabdus luminescens
MTEKARAVGINHVSIEVGNINEAVAFYSALMRIKPGLLSETEGSIELGDQFVAFTCSQGEQAHKPGHFGFVVDDKEKVREALKQFDIEPLPGRFFGFLDPWGNHIEVVSYENIKFTKSPGVLNGMGLADLKKNDRAQRELEEQGYSEPLSSLNSZ

SEQ ID NO: 3091 - protein, 181 aa, Photorhabdus luminescens
LEETWIYSICCCFPREKNGKPLTTGPVLVKSNTLTNLENPFQYFQPHTMKNHAPTHVKNPKTQSVIVCLNRANPEPRTPSQCDYGPTSPGNPTIKLEIIGDIIFNNPIAVDEKGKPTTFQGIKPEANLTLIGLNTGGACEVRGIDEGIFWKHTKVNNDPAKGNNTNLSWDFSKNTGYADFZ

SEQ ID NO: 3092 - protein, 300 aa, Photorhabdus luminescens
FRDCMTNGNKKRRMRSTAINIESKRKYWRGFSFTSLALSVGSLVGCGQSADELSIHVYKDLASCQNNPKNTIAAQCETTYQAALREAERTSQKFRQKAMCELEYGECEAMPGAVGYRPKMAAFMMAAVKPEQFNQYDIAEKYRNVFYQPLFTSTSGYGDLYRKLFFADGKVIGDYSDIGNIQYEMNRRYLHPLETVRLPMEKREVPQVGTNANVVAGINPVLNSRSTAYIASGIVDEIGDYSARKHRERMYRERLIREKEQKFKSSDSRYSGYDSKPIVTTKSSGGFGSTSSAKYSWGGZ

SEQ ID NO: 3093 - protein, 135 aa, Photorhabdus luminescens
VSNTLFRWPIRIYYEDTDVGGIVYNGRYVVFYERARTEMLRQHGIHQQRLLDEQIAFVVRRMVVDYRAPARLDDMLEVQSEITDIRRASLTFIQRIVDGNGAMINSAEVLVACVNTSQMKPIALPKSIVAEFKQZ

SEQ ID NO: 3094 - protein, 167 aa, Photorhabdus luminescens
MQLNKVLKGLMLALPVMAVAACSSNKNADNDQTGVGTVNETNAGLSAEELARQQMQELQNNNIVYFGFDKYDINSDFTQLLDAHAAFLRSNPSYKVVVEGHADERGTPEYNIALGERRANAVKMYLQGKGVSGEQISIVSYGKEKPAVLGHDEAAYAKNRRAVLAYZ

SEQ ID NO: 3095 - protein, 160 aa, Photorhabdus luminescens
MSQLTHINSTGEAHMVDVSAKAETSREARAEAFVGMKPETLAMIIEGRHHKGDVFATARIAGIQAAKRTWELIPLCHPLLLTKVEVQLEAQTKYNRVRIESCCRLTGKTGVEMEALTAASVAALTIYDMCKAVQKDMVIGPVRLLEKIGGKLGHFKVEQZ

SEQ ID NO: 3096 - protein, 151 aa, Photorhabdus luminescens
MENTRIFVGPKNFKLGDEYQWLAQCDEDGAIVTFTGKVRNHNLGDNVGALRLEHYPGMTEKTLRRIVTEARSRWPLQRISVVHRVGTLYPGDEIVFVGVTGAHRHMAFEAAEFIMDFLKTQAPFWKKEFLPDGERWVESRESDQEAVKRWZ

SEQ ID NO: 3097 - protein, 197 aa, Photorhabdus luminescens
HPLLLLYKKTSQKETNMEPQKLETRRLILHPLESKDYIQIQKIFPQWEIVRYLVASTPWPYPDDGALEYINKIALPSMAKGNAWFWTIRRRDEPSIIIGMISLYDQENNNRGFWLDPQWHRNGFMTEAVQVVTDFWFNTLNRNVLRAPKSSDNIASKKISIKSGMRLIRLENRDFVSGRMPSETWEITRDEWNRNNZ

SEQ ID NO: 3098 - protein, 235 aa, Photorhabdus luminescens
VDGQVGIITDTYATPGNVHDSQPFIKRLTRQLERFALNPLAVGLDAGYFTAPVCYLTEQLGIIPIIGYRRPNKGPNTFQKKHFTYDQLQDCYVCPQGEKLIYTTTDRQGYRHYQAPAAICQCCPQRDACTHAKGGKTITRHIWEASKEQARENRLTEWGKKVYKRRKETIERSFADAKQHHGHRYAHFRGLQKVQIQCLLAATAQNIKKIALLVAMLCCFYLWRASQSMPAKRKZ

SEQ ID NO: 3099 - protein, 191 aa, Photorhabdus luminescens; identical to SEQ ID NO: 2585

SEQ ID NO: 3100 - protein, 137 aa, Photorhabdus luminescens
MSEIEVISLKAPISVIAKVTNKSPYKLKLIQDSIRLDQGEWTTLPPQVINRSNDSTPGKAIWRSDSNSLIGGVAGRCTYVFVDSKGEIYSIYITWSNPLIGSSSYSISTDYLGDDLHLSYTADGGNNPVVEYMIVSZ

SEQ ID NO: 3101 - protein, 169 aa, Photorhabdus luminescens
MMTDKEISSVDSLKASFKSGVRLMPEAFSHLIDEAYRAYETIDGAQGDGPTAGLKRDGKGKLALNIHHSGGLNPHQGALALSLKPEGGLSFAGGGYLKLDADRQVQFADFFSLSRRERIEITRVLGLKRTMMTRIVSTTLSPEAREFFGYSVSLNAVGDRLAVGMNTKI

SEQ ID NO: 3102 - protein, 184 aa, Photorhabdus luminescens
SFLSRLSKVNTSHSYHIGIESLPMPEEKDFRDYILILPIPNMPPVYVYLSKPPVKLFEVDLYKNFAGRLRNGTHADHMPSDAAVQAYWKNLYPELKPKQLERLSKNVAAIIIPADVHRKLSATYGGRNTPEQIRQDACDLRGAVDRDFNTIMPALQEYGATERQLEEARVKMHKLNQEQRLYKZ

SEQ ID NO: 3103 - protein, 157 aa, Photorhabdus luminescens
MTVNIESLINSLGKTYQEIFDAGLIPYKTKPTGNFGTEYISLDMVKEGVYLAFKRKDKILFDVTLTLLDSDKPSYTFPNELPSPLISHMSRQWIHEQFGLPEKSKEPKVIMKEEFGWVDLYTILDFRIPTNMQVDYDLSDRVKEVTFLPTSEVRWWZ

SEQ ID NO: 3104 - protein, 157 aa, Photorhabdus luminescens
IMAINIEVLINSLGRTYQEIYSEGLIPYKTKPKGHLGCDYISLDMIKEGVYLAFKRKNKILFVVTITLIDRDKPSYQFPNELPSPLISMMSRQWIHEQFGEPEKSHPPEMIMKHQFGRKDLYTLLNFRVPTSMQISYDLLDRVEYITLLLTSEVCWZ

SEQ ID NO: 3105 - protein, 135 aa, Photorhabdus luminescens
LVLLQDVYLPFVADFMPTALNETPVSIMEKLIYWRIAKYDNQVVAAVLIEQEDDNLTFSYLSVLPAFRCRGIASKLLNIICQEAVQQAQLPIIIALRRSLAMNIHFFTQRGFEYLGPFNTNEHDLYIWRSGENEZ

SEQ ID NO: 3106 - protein, 166 aa, Photorhabdus luminescens
MITGDISTDDIIPARYKHMYTEPTQLAPHLFENRFPEFVSTLQLGDIIVCNGIFGIGSSREQAVSTLLAVGIPMVVAPAFGRIFFRNSWNLGLLAIEADIKGFREGLAVECLINEGRFIAETSLADFYPPSEQMLAVVHAGGRLNYIFNQLPKNPSPKEKEQRIIZ

SEQ ID NO: 3107 - protein, 231 aa, Photorhabdus luminescens
SGIFLSRDISMLSKIADAFKSAFGGKTVAPAVPKVPEVLGLRIGGALEIDPLMLKLIESDLTIENAASTQLICSVGVVDLGDNVRLVRYYTDDEGYLQVLQEGEGDDGVKEVSLWYFYETKPIDSQAQWDALIENGIVTPSRRYDLDGTQFSPLWDNIKPVAVTEKTYSKEGHITETDQFVMVYTRQVAHNRTEELQVVGEEKVVGSHLDRLMVLSTGIQLNQTDFKVVAZ

SEQ ID NO: 3108 - protein, 143 aa, Photorhabdus luminescens
MDYRYGSHTVFQIEYHFVWVTKYRYKVLTGEVASRVRELIRQTFSSFEIRILKGVVSQDHVHILVSSPPTLAPNEIMRRLKGRTASKLFEEFSHLKKRYWGQHFWGRGYFCATVGQLTEEMIKSYLEHHFEPNPNDNFRMDNZ

SEQ ID NO: 3109 - protein, 166 aa, Photorhabdus luminescens
MSAIEAFNKLSGETAGEGYLVFTLGDEEYGIEILKVQEIRGYDQVTRIANTPAFIKGITNLRGVIVPIIDLRIKFAQETVTYNDNTVVIVLNLLNRVVGIVVDGVSDVLSLKAEQICPAPEFAVTLSTEYLTGLGSLDDRMLILVDIEKLLNSEEMALVDSVAKSZ

SEQ ID NO: 3110 - protein, 194 aa, Photorhabdus luminescens
MAEKSIVQEAKDIQLAMELITLGARLQMLESETQLSRGRLIKLYKELRGSPPPKGMLPFSTDWFMTWEQNIHSSMFYNAYRFLLKSGYCEGVEAVVKAYRLYLEQCPPAEGDAPVLALTRAWTLVRFVDSGMLQPSQCRTCGGTFITHAHQPVNSFVCSLCQPPSRAVKKRKLSSESADTNSQLLDGLAQHAVZ

SEQ ID NO: 3111 - protein, 173 aa, Photorhabdus luminescens
SGQYMNIIKQILIQDLERINIEEQRDGKPRFNSQFISNHPYLCLAMLVSYLFLAALIWYAPYFSLLSLLAFTVLFIIMSAVLLLEIKPVYRFDDIGVLDLRVCYNGEWFVSEKISDCAIKELCSHPHVPLTIKDEIKRIIQMKGEIHFYDVYIMAFPEQSHIATSLPMMHSRZ

SEQ ID NO: 3112 - protein, 167 aa, Photorhabdus luminescens
PSIRVCSRNQPSQSRSHPTRPVRLESYQPASFPRLMKAQCKLGAFFGTRRFSCFDHSNFHARGLNTVSQLSFSASSLFRPIKRSWCIRTAIKASSTIITYKSFCYFLVVNLINISLITFLRSKLVKVMTNMINHEPYKCTHKISIIDKMRNAITTHILHNFPACFKZ

SEQ ID NO: 3113 - protein, 163 aa, Photorhabdus luminescens
IIHLCSSLPYRQLRKLIAGEIAAVSCSLPYRQLRNVVFHVVIYCNCSLPYRQLRKSGVRKSRTQISSLPYRQLRKPMCSADSLTSSSLPYRQLRKISEQRNIVDSGSLPHRQLRKLRKLSLMLRARSLPYRQQRTRLSALKKQPIFFSICINCYAFVHILHYZ

SEQ ID NO: 3114 - protein, 161 aa, Photorhabdus luminescens
PMTMDMSSLPYRQLRNRRFERDSSCNCSLPYRQLRKYRIVSKTYPLCSLPYRQLRNISGTNPPLIKSSLPYRQLRNVEQMPTRVVSSSLPYRQLRKVSMCWWVSRLSSLPYRQLRNHVICTNLLTTGSLPYRQLRKLAQITPTRKLCSLPYRQLRNPIFKZ

SEQ ID NO: 3115 - protein, 185 aa, Photorhabdus luminescens
MDYYLEIRVLPDLEFSQQSLFEALFAKLHRALGQLSNGQVGVSFPCARKTLGDTLRIHGSSEALNDLQALPWLKGLRDYTEVIDIQPIPQETKYRCVSRVQVKSSAERLRRRAIKKGWLTGEQARQRIPISKEQRTHLPFLFLKSLSSGQSFLLFVKQGPIQDKPTSGIFSSYGLSSSATIPWFZ

SEQ ID NO: 3116 - protein, 180 aa, Photorhabdus luminescens
MMYSVKGVQYQTLVNIPKNIGLGYSGSNGKVHLVDGDFLFYGSVDIQGENGTINKKTEVDANWTVKFNEMPCDSQGNILLKSHWFSPASNDRWLIKDKMRLMILCSKEPTHRLILETGEIIDNKVDNDYLRNMIFSYTITTALIVSNAFNLKNALIFSGHFLNYRDNPPLFRWNGILDIZ

SEQ ID NO: 3117 - protein, 192 aa, Photorhabdus luminescens
IVHCRTGSLEINDNPMLLMIEVHCRTGSLEISAVRCTALFNVHCRTGSLENQSTATNRQGKPHCRTGSLEMIRPQVAIFVTVHCRTGSLEKGSGPKGKPQLVHCRTGSLEKSNSSQYRYPYVHCRTGSLESKQTKYRSAALVHCRTGSLEKTCSLGPLIKCVHCRTGSLEMHPSTLSPLTIVHCRTGSLERZ

SEQ ID NO: 3118 - protein, 228 aa, Photorhabdus luminescens
MNVWKKLFKAIKGTVNNAAEAVADGNALTILDQEIREAKAEIRRADESLVSIIAKRKMAEKKVADIKNSITEYEGYARSAAGKGDNGLALECAQKVATLRDELEREQGLFESFQKAETTHRHTVQEAKKKVSQLENQVDLVKATEQVQKAQAATHSSVVGASSKTSTALDSLERIKSRQAEKAAQFEAQQELHDSMTSSDLDKKLKEAGITSSSMSAEDELARILGKZ

SEQ ID NO: 3119 - protein, 138 aa, Photorhabdus luminescens
MSDQKIADILKRVKTIALVGASEKTARPSYKVMAYLLEQGYQVIPVSPKLAGQTLLGQRVYAQLADIPQAVDMVDVFRNADAAYDIAREAIDIKAKVLWLQLGVINEQAKILAEEAGLDVVMDRCPKIEIPRLGLEKZ

SEQ ID NO: 3120 - protein, 153 aa, Photorhabdus luminescens
MELTTRTMATAKNIALIAHDHCKTSLLAWSKKHKSLLKKHHLYATGTTGNLIQNETGLSVTNMLSGPMGGDQQIGSLISEGKIDVLIFFWDPLNSVPHDPDVKALLRLATVWNIPVATNLASADFIVSSPLFSESVDIQVPDYQHYLNGRLKZ

SEQ ID NO: 3121 - protein, 146 aa, Photorhabdus luminescens
LIYSNNQYSDNQYSDNQAVINRILLPLLRQSGNEARWLLWVSPHKKLSRQWLINSGLPLDKIIQLNRMSSITTVEAMERALASGNYSVVLGWLPTLSGKDTVRLQAAAQKGNALSFIMRPQDVSKETSRAESRSDLLKIHSIHYHZ

SEQ ID NO: 3122 - protein, 152 aa, Photorhabdus luminescens
MKYQQLENLECGWKWTYLMKKHQEGELITKYIENSAAHAAVDKLIELESEPVRVLKWIEQHMNPDLSNRMKQTIRARRKRHFNAEHQHTRKKSIDLDFPVWHRLSALSQRRGNTLSETIIQLIEDAERKEKYANQMSSLKHDLEAILGKKEZ

SEQ ID NO: 3123 - protein, 173 aa, Photorhabdus luminescens
MVDKLKSYTKEDLIASGRSELFGENGPPLPSGNMLMMDRIIEMTENGGTHDKGYIEAELDITPDLWFFDCHFIDDPVMPGCLGLDAMWQLVGFFLGWLGGEGKGRALGVGEVKFTGQVLPTAKKVTYRINFKRVINRKLIMGLADGEVLVDGKIIYTATDLKVGLFKDTSAFZ

SEQ ID NO: 3124 - protein, 184 aa, Photorhabdus luminescens
LALILVIFISACSRQPEKTYYQLPVVAIASQKSAIVQHDRQLWVQRVMLSDYLSSSGVVYQSSDVSYVSAANHLWASPLEQQLQQVLVAELTMALPQRLVSAQPLVNKPDTLDVTVTSFHGRYDGKVILQGYWTLTHQGSVVKQPFNLELKQEEDGYDDLVRTLAKGWSQLVQAIASQLISQSZ

SEQ ID NO: 3125 - protein, 182 aa, Photorhabdus luminescens
MNIKPDDQWRWYFDVNHDRVMLDLSNGMVFRSCFPAKMLIPYAMGETSFSVEDATLYYCFEEQTRRINISDESRAELVLNALVAFRFIKPQMPRSWYFSRFAMIEKPVQGELIQVRLQDCGTDAIFLVVEAGDSASLCLLAQPQLTLSDRVMNFCDPIKIMNDRLMPFVESIYMPIYGTAIZ

SEQ ID NO: 3126 - protein, 147 aa, Photorhabdus luminescens
MEELQQLLEQQVTYLTSLTQTVAEEQRILCEGFIEARDLHQITERKIFLLSALSHSEQQRLNLSKALNITAPYDKQPLLATLWQQIGKAVIRVRDLNTHNGSLLTQHLDLNSKAIAFLKSHHSPSLYGSDGQAARHSMLSGHKVQVZ

SEQ ID NO: 3127 - protein, 138 aa, Photorhabdus luminescens
MLDKLDAAFHFQQEALSLRSRRQEILSANIANADTPGYQARDIDFATQLKKTIAHGRVTGNGIGLTLTSDRHIPIQPQKRMEMDLLYRVPYQPAMDGNTVDMDMERSNFMDNSLKYQAELTATSSQVKSMMAVLQQGZ

SEQ ID NO: 3128 - protein, 295 aa, Photorhabdus luminescens; identical to SEQ ID NO: 1209

SEQ ID NO: 3129 - protein, 115 aa, Photorhabdus luminescens
MQVSSALAGVLLLIFTLTWLIRRMGLFSSKGKTQQQLSIKASCSLGQRERVVIVEVEDNWLVLGVTAQQINLLHQMPIPESNRDNTEGQAIKPALFGQILKNTLMRQGKDDEKKZ

SEQ ID NO: 3130 - protein, 159 aa, Photorhabdus luminescens
MSDYSYEHKRKNPFGMILLVLIAVIGTAIGGYSWWALKQAKESDSAASKAIAVPVFMTLEPFTVNLIDNEDHFDRVLYIGVTLRLADEKTRQRFHEYLPEVRSRMLLLLSRQKSADLAHDSGKLRLMDDIKQTLRPTLVPGEPDQVITDVLFTTFILRZ

SEQ ID NO: 3131 - protein, 148 aa, Photorhabdus luminescens
MQQQSPLITLRDLAQNAVEKAATHLAQVCQNYQQMEQQLATLMGYQDEYRERLNDTLSHGMPCTTWQNYQQFMKTLEKAIEQHKLQLNQWQQRLDTALSQWREKQQRLNAFDTLQQRADNNRRLHQNRTEQKQMDEYAQRSVQRRNKZ

SEQ ID NO: 3132 - protein, 126 aa, Photorhabdus luminescens
MDNKMDLLSAYQRILSLSEQMLNLAKNEKWDELVDMEITYLKAVEVISHSSISSTTSLSLQQKMTNILQIILDNENEIKKLLQKRLDELSKLIKQASQQQLLNDSYGQFPVEPYHNTLMNSTEQKZ

SEQ ID NO: 3133 - protein, 171 aa, Photorhabdus luminescens
MSVTTQKKRPLSRYIKDYKHSQTHCLHCHKALDRISLVFNGQVINKESISEMTELIDDKTWDELQDKFVALCRFCSEIYCNSETDYFDIMSFKQYLFEQTEMSHSTVREYVVRLRRLDELLTSSNYPVKEFTTEKIQEKLSEKLSQSAFSNYNIALRKYEQYLSWQQGGHZ

SEQ ID NO: 3134 - protein, 183 aa, Photorhabdus luminescens
MQKLLLSCGVIFSVSAITLPAQAEQHTASIGYAYVKPQDVSALNGATLSYRYELDDQWGLLSSFTFAKGDEKETKYYTGEDLKYYSVMIGPTYRINDYISLYGQLGLSRINDKSTAHYSGGYIEKESTSKNTLGWGAGFIINPTTNTSITAGYEGSRFSIKDGNEKDHLSTNGFNITVGYRFZ

SEQ ID NO: 3135 - protein, 110 aa, Photorhabdus luminescens
MSEGQKDPKIDVYETRRFSKALSRLSEDLLRIVEDEIDRIIDNPEIGEQKKGDLSFLRVHNFQLNNQLTLLGYCWVEGKIELYLLNFGSHENFYQEQKRHRKADLKLIGZ

SEQ ID NO: 3136 - protein, 155 aa, Photorhabdus luminescens
VPTSTRFAVAIHILTDIALHHGQAVRSEDIAKSVNTNPTVVRRLLGALAEAGLTYSQMGQGGGALLARPSNQISLLDIYRAVEDPLYFTLHRSKPNPKCYIGHNITPVLEDEFSRVTCVLETALAETTVADIVNRVEDCAGFPFAPHDLSQQIKZ

SEQ ID NO: 3137 - protein, 148 aa, Photorhabdus luminescens
MLKTLLTQDVIQVIPDVKNWREAIAIACQPLVENGAISACYIDAIYHSHEVIGPYYVVGPGMAMPHARPEQGVNKLALALTVISKGVEFGSEENDPIKLLIVLAATDSNSHIEVIAQLAELFDNQQDVALLMSAKSKEEILAVISQYZ

SEQ ID NO: 3138 - protein, 301 aa, Photorhabdus luminescens
MFDLWIYSYMPAKIIDGKTIAQTIRSEVAVRVQQRVAAGRRAPGLAVVLVGENPASQIYVASKRRACEEVGFVSRSYDLPDTTSEAELLNLIDQLNNDSDIDGILVQLPLPAGIDNVKVLERIQPDKDVDGFHPYNIGRLCQRAPKLRPCTPRGIATLLERCGINTYGLNAVIIGASNIVGRPMSLELLLAGCTTTVTHRFTKDLRHHVEQADLLIVAVGKPNFIPGEWIKPGAIVIDVGINRLEDGKVIGDVDFETASERASWISPVPGGVGPMTVATLIQNTLQACEEYHDVERIEGCZ

SEQ ID NO: 3139 - protein, 163 aa, Photorhabdus luminescens
RGNEFAKDFITHDLQVIKNRESILSLETHVFGQDKVLSSYFQEKFPLDDDKGECIGILFHAWKVQDNSLTRLFHSKLPPSIMFQSPTHLLTEQEWEVVFLFLQKYNRTQICQLLKISDKTIEEYIRKIYNKLKVNSDSQLEEYCRLNSFDLYAPKRFLLSYLZ

SEQ ID NO: 3140 - protein, 163 aa, Photorhabdus luminescens
VELAKSAYPKSGGVLGGYLDATGSISGRGVYEYPSIRVYSAVNKPSPGELGAYTTGECDGRYGSKNMALKSTNGWWKCGDTGVIYQWGVTRVLEPLEIITVQLPVRFSNACVNVMLTVNRLGASGGIANGYAAVLSPSSFKLTNDYANTGISVGYYWLAVGYZ

SEQ ID NO: 3141 - protein, 177 aa, Photorhabdus luminescens
LTIYANDENSNRKYTLATPEKSGTLATLDDINISVGSPIPWPLPNVPAGYLACNGQSFNKSLYPQLAIAYPSGVLPDLRGEFIRGWDDGRGVDRGRGVLTHQGDAIRNITGYTPGTILRGNNSYGGCFSLSGEKAPGNEYTDVWQKQVLFDASRVVPVASENRPRNIAFNYIVRAAZ

SEQ ID NO: 3142 - protein, 167 aa, Photorhabdus luminescens
VTDIFNQNALTTDLLISRFDLDKAVGKQLDIIGEWVGRNRMIQTPIESYYFSFDITDLGFDSGQWKGRFDSDKSYIKLDDDNYRVVIKAKIGANNWDGTAESFNNILSFIHSNNGLSVSFEDNLDMSFTVTIKGKSISTITKEIIHQGYLSLKPMGITVNYHIVEGZ

SEQ ID NO: 3143 - protein, 193 aa, Photorhabdus luminescens
MECVFFSFYKDTFDVLNIATLGPSGTSSEQSAIRFGEFAIKNNVAKSYQVVLCNTYEEASNQIILNNCQALVVANAYYNISEFYMDNRFNLSSAFLNYTPNYGIAIRDELTTDNIVIATHPAPKALIPELLPDNLRIADIIFKDSTSSAAKAVANSEVDAALTTEVAAKLHNLKFISHIRPIQMLWSVFTAAZ

SEQ ID NO: 3144 - protein, 181 aa, Photorhabdus luminescens
MSLLTLHTITTTPEKSKKLLQSSINDFGWIPNQSGYMSESPSLLAAYQRAHDLFIDSSLNEEEKAVVWITTGVENGCNYTIQAHGYIAIHNGVDKKTVKALIEKTDDLSPRLLALREFTIEVIYCRGQLKRSAIDLFLSRGFSKQNMLDVVLGVSQKNMSTILNSIAGTEIDDKFKLDDLZ

SEQ ID NO: 3145 - protein, 169 aa, Photorhabdus luminescens
MNADFKQGLNARVKFNGDFYSVQTYSGNGLLGADPSGSNYLLQPIVSDQELGKAVLDALSKSRVIPLDKYGDYFDHDVNAEQYKNWITEMMGSYNYRSKRQLFKKMLSCGICMLDGQITIRPSCHEKLEGWSEDGISEADYVIIPADSSPAEVGAALRLAFSRCRSYVZ

SEQ ID NO: 3146 - protein, 519 aa, Photorhabdus luminescens
MTSTQQRAELQRQIWQIANDVRGSVDGWDFKQYVLGTLFYRFISENFANYIEGGDESINYAELSDAVITDDIKDDAIKTKGYFIYPSQLFANIAENANKNDNLNKDLNSIFVAIESSANGYPSEAEIKGLFADFDTTSNRLGNTVKDKNTRLAAVLKGVAGLKFGQFESNKIDLFGDAYEFLISNYAANAGKSGGEFFTPQHVSRLIAQLAMHGQTSVNKIYDPAAGSGSLLLQAKKHFDAHIIEDGFFGQEINHTTYNLARMNMFLHNINYDKFNIMLGNTLTEPHFGDDKPFDAIVSNPPYSVKWIGSDDPTLINDDRFAPAGVLAPKSKADFAFVLHALSYLSSKGRAAIVCFPGIFYRGGAEQKIRKYLVDNNYVETVISLAPNLFFGTTIAVNILVLSKHKTDTTTQFIDASPLFKKETNNNILTDNHIEQIMQVFDSKDDVEHFAKSVSFEAIAANDYNLSVSSYVEARDNREVIDITKLNAELKTTVKKIDQLRMDIDAIVAEIEGTENKAZ

SEQ ID NO: 3147 - protein, 169 aa, Photorhabdus luminescens
MNADFKQGLNASAMFNGDFYSVKTYSGNGLLRADPLGSKHLLQPIVSDQELGKAALDALSKSRVIPLDECEDYFDHDASDEQYKNWITEMMKSYGYRSKRRLFKKMLSCSICMLDGEITIQPSSHEKLEGWSGDGISEADYVVIPADSSPEEVGAALRLAFSRCRSYVZ

SEQ ID NO: 3148 - protein, 167 aa, Photorhabdus luminescens
MSEIFKRWRNARCVFNGDFYSIISYSGYRSLNLDLLGGNHMLSPDISDEELGIVILDALSKSRLIDPDDNFFDNEKKAERYKEWVKLLMETYNYCSKRQLFKKMHNCGIQLLDGQITIRPSSHEKLEGWSGDGISVADYVVIPADSSPEEVGAALRLAFSRCRSYVZ

SEQ ID NO: 3149 - protein, 180 aa, Photorhabdus luminescens
IMMLKIIKPVNDQEVIINIDGYTPIDIQLVDNINETPLYWRVGDDKKSLLEFAILPSNGRIAAITLVIINPEFIQYADDYLIESYESKCGFPIVDVNIWRFTENNDFNHRFIDEFNCVIKALIYQESIMLVIKEKCMLSSWIKCSNSLWLGLDDDENIVSVLIRGLSKEDINNFFNSISZ

SEQ ID NO: 3150 - protein, 181 aa, Photorhabdus luminescens
MKVYLAVVATSLLFIAESANAISVNVQAGRHFTHTSAAIGDNSAGLSLNGNWARSDHNGQLGSLGTAFSLPVGPLTASIGGKALYLSPKDGKNGEALAAGVGLSWTIMPALALYGEAYGAPSRLTSGIDSYVEAAGGLRFTVFKPLTVDAGYRVMNMRGKEGNRDNKLADGFYIGAGLNFZ

SEQ ID NO: 3151 - protein, 182 aa, Photorhabdus luminescens
MEFTFYTAGLIAILATIRVITHTNPIHALLYLIVSLLALSAVFFSLGAYFAGALEIIVYAGAIMVLFVFVVMMLNLGKSVVEQERVWLKPRTWIGPGILSTMLLVVLVYTIINVSHGDIADNITGEVVSAKEVGISLFGPYVLAVELASLLLLAGMVVAYHIGREHKQGEVLSNRNAEEQPZ

SEQ ID NO: 3152 - protein, 181 aa, Photorhabdus luminescens
MTLKELVVGFATQVRSIWMIGLHAFHKRETQMYPEEPVYLPPRYRGRIVLTRDPDGEERCVACNLCAAVCPVGCISLQKAEHEDGRWYPEFFRINFSRCIFCGLCEEACPTTAIQLTPDFEMGEFKRQDLVYEKEELTISGPGKYPDYNFYRKTGVAIDGKSKGEADNEAKPIDVKSLLPZ

SEQ ID NO: 3153 - protein, 183 aa, Photorhabdus luminescens
MQSEINASAQQARLDVVNVTESQAKADFVLSTEEHDAIEHEKHHYEDPRAASIEALKIVQKHRGWVPDGAIYAIADVLGIPASDVEGVATFYSQIYRQPVGRHIIRYCDSVVCHITGYQDVQAAIEKHLNICPGQTTKDGRFTLLPTCCLGNCDKGPTMMIDDDTHSSVRPEEIEKLLEQYPZ

SEQ ID NO: 3154 - protein, 256 aa, Photorhabdus luminescens
LLPHIVRAQPRFVLGKFRVGFDQIVTVTARLHGIQAVIRQAGIGRHHAYHRIDCLPFDGLRGQTQLKRLTGRQDQWLIFDTAHRCDCRGGRVYLTGLSVCNRDIGTLRTGMLLPGQRFQVDGFYHWGGGIIAAAFSLRGFGTTESGLQSFLFRIPVGLATFIGSDAFPLSGNIMQFAYHPVQRPTGDNLAVMIGDLRTVERHIAAGQNFTGVTLFNLSFPDGAGVLIFVKVITAAAVRHDGIVHFVFIAVGGVHLZ

SEQ ID NO: 3155 - protein, 263 aa, Photorhabdus luminescens
MTLPELQQQILAYTLLLPRIMSCFVIFPVLSKQMLGGGLIRNGVACSLALYAYPTVAGSQLPTLSSLELTLLLGKEVLLGLLIGFIASIPFWAMEATGFIIDNQRGATMASVLNPALGSQTSPTGLLLTQTLITLFFSGGAFLSLLGALFQSYNSWPVTQFFPKITNQWLHFFYGQFSYLLQLCALMAAPLLIAMFLAEFGLALISRFAPSLNVFVLAMPIKSAIASLLLVIYIQLLMHHAYDKVLLMLSPVRMLIPILEAPZ

SEQ ID NO: 3156 - protein, 366 aa, Photorhabdus luminescens
MSNMSFMEKLLQGAEVVWESLEQVAKIKHGKDWKNLNAGDIPVYGSGGIMGYVDTYSYNQPTVLIPRKGSITNIFYIESPFWNVDTIYYTEIDAKKIIPKFLYYFIKTIDLLALDTGAGRPSLTQAILNKIQIPIPSLNIQTEIVRILDAFTELTAKLTAELTARQKQYEYYRDQLLSFEENEVEWKTLGEIATIGTGSRNTNEAVLDGQYPFFVRSQEPRAIDSFEFDETAIITAGDGVGVGKVFHYVSGKYALHQRAYRIVVRDDRFNSKFLFYYIRNNFAHYLTKVSVHASVTSLRKPMFEKYPIPIPPLVEQDRIVAILDKFDTLTSSISEGLPREIELRQKQYEYYRDLLLSFPKPEVEAZ

SEQ ID NO: 3157 - protein, 152 aa, Photorhabdus luminescens
MSAIPPTSNGWLRKMQLGQQYMKTWPIEKQLAPMFPENRIIKATRFGIRFMPPLAIFTLTWQIALGGQLGPAVATALFACSLPMQGLWWLGKRASTPLPAALLKWFHEIRDKFAAAGITMAPVQQTPTYQSLAELLKRAFKQLDRSFLDDIZ

SEQ ID NO: 3158 - protein, 143 aa, Photorhabdus luminescens; identical to SEQ ID NO: 2558

SEQ ID NO: 3159 - protein, 169 aa, Photorhabdus luminescens
VRIFASPHAAFTPVPSPILVIRLALPLTNPTVKPSPIWVITLPTSEISRPIVVPSPTLVSILPLPNRIPAVVASPICVITFAFAAVTTPIKSSPTLVTILASPSANTPVKPFPTCVMILARPNMAASVVPLPTLVITFSSPANKPILAPLPSWVKILAFPIITAAVWSZ

SEQ ID NO: 3160 - protein, 385 aa, Photorhabdus luminescens
MSKTLTGIAQQLKDANKKVQLIYAFNGTGKTRLSREFKQLITPKNDNDKGGNNEELSLTRTNFLYYNAFTEDLFYWDNDLSENTEPKLKIQPNSFTDWVLKDQGQDRNIIANFQHYTDEKLTPHFSENGSEVTFSFERGNEAPTENVKISKGEESNFIWSVFYTLIEQVISVLNVAEPGERETDQFNQLQYVFIDDPVSSLDENHLIELAVHLAKLIKSNESSVKFIITTHNPLFYNVLHNELNSDDKSYKKKWFEKYRLTKHEDGTYQLAIQPNDSPFSYHLYLKSELEKAIENGQLSKYHFNFLRNILEKTSTFLGYKKWGDLLPKTGDGRPNPYEARIINISSHSKHAGEEVAELTEDDKRVLRYLVNEINTMYRFQQAENZ

SEQ ID NO: 3161 - protein, 153 aa, Photorhabdus luminescens
RLLKKGVFIGLISYFFIYYHLYDLRKLIINLWIEVTILRSFMKCIKCENPTLHESDFCAACEEKELSRIGGFLYFPAINIIFAILSSLFSAYKAMTILISGYDFLGELRVLIGFEFIPVIFQAASLLAALTHPGHIVIYAPGDSFPCRRDATZ

SEQ ID NO: 3162 - protein, 171 aa, Photorhabdus luminescens
MKTGIFTPYIPKDAISCVQYLRDDEGNDWYQIQEKFLEETIKFTFNKDGVITSISKDISSLFPIHLSVAELAPEDVPTEIIITDGWFFDGEKIIKRIYTLEEQRQQEKNQKSEKMIAANEVIQPLQDAIDLGIATNKEKALLLEWKRYRVSLNRIDTSLASEIIWPEQPKZ

SEQ ID NO: 3163 - protein, 190 aa, Photorhabdus luminescens
MRDDEFLRGQKVPMTKEPVRALALERLELNGASQLIDVGAGTGSVALEAALCFPALTVTAIERNPAALALIEENRQRLGCHNVEIIAGEAPLALDVMADAVFIGGSGGQLTALIDWALDHMYPGGRLVLTFILLNNLNDALEHLRTCQISQLECIQLQASTLATLGTGHYFKPNNPTYLISCYKEKIDVZ

SEQ ID NO: 3164 - protein, 182 aa, Photorhabdus luminescens
VILITGGVRSGKSVLAERLVAQASEQVLYIATAVVTDSEMAERIQLHRENRPAHWRTWEGYRDLGAVITTQTRPGEAIILECITTLITNLLFEQAGETPPEQMDFAVLEVGIQQQISDLLAACARMTSPIYLVTNELGMGIVPENRLARHFRDIAGRVNQRLAAAASEVFLMVSGIEVKIKZ

SEQ ID NO: 3165 - protein, 160 aa, Photorhabdus luminescens
MANIIYLEIKGDKQGLISQGCSTVDSIGNTCQLGHEDHIFVYELTSNITRGQHVNHQPVEIRKPIDKSSPLLGLAITNKESLQCIFYFYRTSTKGGLELYYKIKLTGAYICALNGFYPNSSTHNECQPQESLSLMYKSITWEHIMSGTSAYSIWEDNVYZ

SEQ ID NO: 3166 - protein, 186 aa, Photorhabdus luminescens
MSEERYKQRKQRQKERFMAQVAAAQENRGIVIIYTGNGRGRTPAAMGTVTRALGHGLKAGVIQFIRDEWSAGERVLLQQHGVEFQLISMNLTGEMQNRAKDIAACSEVWHHALRMMRDPELSLVVLSELVCVINNGYLLLDEIIKALSERPINQTVIITGQDYPTELIELADTVSEMRPGKYVFTZ

SEQ ID NO: 3167 - protein, 141 aa, Photorhabdus luminescens
MYFYSAKTNSFYPIELEQNYIASGSLPDDIIEVGLDIYQEYAANNVPEGKYRIAGQNGLPEWADIPPPTREELQQYIESKKQQFIVEASQQIAPLQDAVDLRIATKEEEAALLVWKKYRVMLNRIDISLAPDIEWPEQPKZ

SEQ ID NO: 3168 - protein, 184 aa, Photorhabdus luminescens
MQHNKIKVAFLDRDGVINKEVNYLHKIEDFEYTSKCIVGLKKIRDLGYEIIIITNQAGIARGYYSEKQYQLLTDWYRNDLKEKGVDILDIFHCPHYPDGIVPELSKDCYCRKPSPGMIEQARKKYSIDIKSSILVGDKNSDIHAGERAGIPRCFLVKTGHPTSEPTENAILSNNLFTISKLIEZ

SEQ ID NO: 3169 - protein, 157 aa, Photorhabdus luminescens
MSVQQPVKSVAVKTEEQQSILTLHRMRQQLVKFRTAQINALHSMLPEFGETLHKGRAALAKELPDTLERLGTWLPTYLISLLDEQYQRLADLDAHIDDDIEKQLSAVAKQNKTCQRLLAIPGINPLIATAAVATMDEASAFKSGREFAAFIGLVSKZ

SEQ ID NO: 3170 - protein, 169 aa, Photorhabdus luminescens
LFLGGFMLNIVLFEPEIPPNTGNIIRLCANTGFQLHLIQPLGFTWDDKRLRRAGLDYHEFANIKQHHDYFAFLENEGLTGASSARLFALTTKGTPAHSAVSYQAGDYLMFGPETRGLPPYVLDNMPPQQKIRIPMLANSRSMNLSNSVAVVVFEAWRQLDYQGAIIREZ

SEQ ID NO: 3171 - protein, 1039 aa, Photorhabdus luminescens
MYEYKTVAESNNFIVLDKYTKELQLNETYQSEGDLERELIDDLVNQGYEYVSGLNTPQNMLANVREQLQILNNVNFSESEWQRFVEQYLDKPSDNNIDKTRKIHNDYIHDFVFDDGHIENIYLVDKKNIARNKVQIIKQFKQTGAQANRYDVTILVNGLPLVQVELKKRGVAIREAFNQVHRYSKESFNTENSLFKYLQLFVISNGTDTRYFANTTKRDKNSFDFTMNWAKSDNTLIKDLKDFTATFFQKNTLLNVLIHYSVFDVSNTLLVMRPYQIAATERILWKIKSAYQAKNWSNTESGGYIWHTTGSGKTLTSFKAARLATELDFIDKVFFVVDRKDLDYQTMKEYQRFSPDSVNGSESTAGLKRNIEKDDNKIIVTTIQKFNNLIKSESDLPIYNKQVVFIFDEAHRSQFGEAQKNLKKKFKKYYQFGFTGTPIFPQNALGADTTSSVFGRELHSYVITDAIRDEKVLKFKVDYNDVRPQFKSIETEQDEKKLTAAENKQAFLHPVRIRAISQYILNNFRQKTHRLQAGGKGFNAMFAVSSVDAAKAYYEAFKHLQKETEENKANKKPLNIATIFSFAANEEQDAIGELIDESFELTAMDSSAKEFLSAAIDDYNAAFKMNFGVDSKGFQNYYKDLAKRVKNQEVDLLIVVGMFLTGFDAPTLNTLFVDKNLRYHGLMQAFSRTNRIYDATKTFGNIVTFRDLEQTTVEAITLFGDKNTKNIVLEKSYKEYMEGFTDLITGEARRGFLEVVTELQRRFPNPDDIVKEQDKKDFAKLFGEYLRAENVLQNYDEFAGLKALQHVDISNPEAVEAFKAKYYLSDEDIAAMQAIEMPTERTIQDYRSTYNDTRDWLRREKSSNEKDKSTIDWDDVVFEVDLLKSQEINLDYILELIFENNKKNKNKAELIDEVRRLIRSSLGNRAKESLIVDFINQTNLDEIIDKASIIDEFFKFAQAEQKREAEELISSEKLNEDAAKRYITASLKREYASENGTELNSTLPKLSPLNPEYRTKKQAVFQKIAAFVEKFKGVGGQIZ

SEQ ID NO: 3172 - protein, 159 aa, Photorhabdus luminescens
MSEQSNTEMAFQIQRIYTKDISFEAPNAPQVFQQEWQPEVKLDLDTASSELAQGVYEVVLRVTVTAALGEETAFLCEVQQGGIFSIDGIEGTQLAHCLGAYCPNILFPYARECITSLVSRGTFPQLNLAPVNFDALFMNYLQQQAEQSQGGEQTEQEAZ

SEQ ID NO: 3173 - protein, 146 aa, Photorhabdus luminescens
MLQEIMQFINQHMTLSLIWIALLVAVIVTTTRGFFSKTKEITRAQAINLINKEEAIVVDLRSREDFRKGHIIGAVNLTPSEIKDNNFAELEKHKKQPVIVVSANGTESRTPAENLLRAGFERVCSLKEGLVGWTGENLPLARGKKZ

SEQ ID NO: 3174 - protein, 143 aa, Photorhabdus luminescens; identical to SEQ ID NO: 2558

SEQ ID NO: 3175 - protein, 162 aa, Photorhabdus luminescens
LMKTKAIYPGTFDPVTYGHIDIVTRAADMFDHVLFAIANSARKNPMFTLDERITLAKEVTSHLDNVEVIGFCELMANFAKKQQANILIRGLRSVSDFEYEWQLANMNRHFMPELESVFLLPSQNLSFLSSSLIKDVALHDGDISSFLPEPIAQAMLKKLGKZ

SEQ ID NO: 3176 - protein, 153 aa, Photorhabdus luminescens
MMKKIDVKILDPRIGEEFPLPTYATPGSAGLDLRACLDNAVELAPGQTELLPTGLAIHIGDEQLAAVILPRSGLGHKHGVVLGNLVGLIDSDYQGQLMVSVWNRGDKAFTIQPGERIAQIVFVPVVQAEFNLVEDFETSERGSGGFGHSGRQZ

SEQ ID NO: 3177 - protein, 169 aa, Photorhabdus luminescens
IEQPHWINLHGKPSIGGLFCIENKNMILRQIKQDVYNRLCENRPQVLEKNRGYGVISITLNGLTFAVPLRSNLNHPNGFKTIFIKEKKCWSGLDYSKALLIDVDDLEPQAFKLKMEKEYEKLKANEKKIEVEFGAYVQGYIEYINTGEGDDRCYKFTTLQYFHRDLGLZ

SEQ ID NO: 3178 - protein, 173 aa, Photorhabdus luminescens
SITNQHNIIHNNFTYYSLLFLDDFYGNHGFFGYYPQTKYGPFCFSEECILTAEQIFKTPISLLKQSLIFIPVFVFFIGLYNYKLAIINTKNDNILNKERDFYAYLKENPSDKEDLLKALNKKKLFNALFDDELNFNTGAKEKIELYIKNRKSHGVITLLDENKKEAYKKIYLZ

SEQ ID NO: 3179 - protein, 542 aa, Photorhabdus luminescens
MSDSIFNFKNYPIVFIGSGMSKRYLENSPTWPELLEEYWNKIDNNGQGFYNYLSEIKDKYKEEQNDSDLNHKVYSDAATYIEKKFKELFNSGKISLEGLTSKRVFDEDISPFKYSLCQRFKQDKLRQNIKKDEFESFKKFLKNAKMIITTNYDSFIETLLSEQNVEPKMYIGNEGFFDDTIGWSELYKIHGDIELPNSIVINSYDYERYDDKSILISAKILSSMIKSSIIFIGYSLTDRNVKKLLTDFSSQLPKEDKRKSAERIILIEFKKDEMDIIKTHRTDDKSQITYTSIETDNYKKIYDEISNIDEGLPPYDILRYQRVIKQLILEEGEKGNLGSLLVTPSDLDELEKHANSGKNLVVALGDKQLVYIRVKEMEYLEDYIFDKSEIPNKSAIEFLIDCPPHARTPFSKLIKSCDFHNIKISKKEMKKIETRINMHGKIDNLVKSVNLDKKYSSIGFRSIEDIKAENLLKNKELLVIIKNIKSISKDELRKYIQEEAFPLFKINGKDDHLKSNLRKLFLAFDLLTYGDVSLDLLNKGDZ

SEQ ID NO: 3180 - protein, 229 aa, Photorhabdus luminescens
KWEFNSGLWNAWLMYPKSLLENNGKSAFEIANGKPFFEYLDSNKLLKSKFDSLMSKDSDKMIEKLFNVYDFNQHDKILDVGGGEGNLLIRMSEKVKEKHYAVLDRYNELPDYGNINFIDGDFFKSIPSGYDLYILKNVIHDWPDNDAILILENCRKAMGNNATILLITLMKKPQSNIIKYFDILMDVSSLGKERDLTEFEYLANQAGLVIQDVKDIDESYSIIQLGVKZ

SEQ ID NO: 3181 - protein, 265 aa, Photorhabdus luminescens
NTIKDIMVMLRVILIGFKSGLSEAKKSPLNLWLSAFVNFSYYIAQAFFWYAILNSQSSGYILSDGFIIIFFTTVCLVDNLYLFLFGRGSLLLVKKVKSLKLEPHLTLPINTQFLYVTTNIAFEHFLLSFLSLVLFFTVHIYFGTNILLVFLHFIMVLEGVLILTSITWIIRTTIFWTTSLVSIKNSNPCFKVLVRPEQSFHGVVRFILMFILPCLFITGVPASVVSGIMSMKWFFIQTLVTLILIFIAKLVFDIGVKRYSKYITZ

SEQ ID NO: 3182 - protein, 162 aa, Photorhabdus luminescens
GNEMKLGIISGSHRSHSNSGKVGDFLDSLEITKKTFKHTEHFHLGNLNIPIWDESIWNEVKDPKWHEWGLISQSLMNSDAFVIVVPEWGGMVPPKLKNLLLLCSDNELVHKPALLVSISSGNGGAFCISELRSSGYKNNKICFIPEHLVLRNIEKEGDIDKZ

SEQ ID NO: 3183 - protein, 176 aa, Photorhabdus luminescens
MKRTLVASVVAVGLSVFAFAANAGESTISGGYAQSHVKFNGEKIDGNPKGKGFNLKYRYELDNNFGVISSLTYTHKGFDKFDVNYYSLMAGPAYRFNDYVSAYGMIGAARGEFEVPVLNGSYTEGKSSVSYGLGLQFNPVPNWTIDTSYEYAKFNDARLGDLKVGTWVVGVGYRFZ

SEQ ID NO: 3184 - protein, 178 aa, Photorhabdus luminescens
LIASAVAVGLSVFAFAANAGEHTISGGYAQSHVKVDGEKLDENPKGFNLKYRYELDNNFGVIGSFTLTHQGYDYYYGSSKIGTGDLDYYSLMAGPTYRFNEYVSVYGLVGAAHRKVKGEFSAYGYDFEYKESKTSAAYGLGLQFNPMPNWVIDASYEYSKLGDFKVGTWVIGAGYRFZ

SEQ ID NO: 3185 - protein, 179 aa, Photorhabdus luminescens
MKQLLDFLPLVVFFVVYKMYDIFYASGALIAATGLAVAMTYFIYRKVEKASLITFIMVAVFGTLTLAFHSDLFIKWKVTVIYALFALALLGSQWFMKKPLIQKMLGKELILPDLVWNKLNMAWALFFTACALANIYVAFWLPQDVWVNFKVFGLTALTLVFTVLSVVYIYRHLPREQKZ

SEQ ID NO: 3186 - protein, 144 aa, Photorhabdus luminescens
MTQQQLPNGELVLRTLAMPADTNANGDIFGGWLMSQMDIGGAILAKEIAEGRVVTVRVDGITFLKPVAVGDVVCCYAHCLKTGNSSITINIEVWVKKVASEPVGQRYRATEAVFTYVAVNEDNTSRRLPEGKTHFQLASSTSEZ

SEQ ID NO: 3187 - protein, 164 aa, Photorhabdus luminescens
LELILTELCPCGSGIDFADCCSPYLQNIKFAQTAESLMRSRYSAYVKHNADYLITSWHPDCQAEKWRLDIEQSFIVTQWLGLNVITTEKGENDNEAYVEFSACFLDQKSQDKQLIHERSRFLRIDQHWYYIDGVKPIDGIKPQIGRNSPCPCGSGKKYKKCCGZ

SEQ ID NO: 3188 - protein, 294 aa, Photorhabdus luminescens
LIVMTSLAALQTAISKLTVWRKGDQRAPHKPLLLLYVLSEYKKGHGQLFKYGDEIHQPLLQLLTDFGPSRKEHYPSMPFWRLRRDGFWELKNAEHCTPRRGSKEPPKRELIEYQVAGGFDSDSFQLLRRQPALVDELAQQILNEHFPESVQVSLVERLGFDINKRLNSRDPRFRDVVLRAYHYRCAVCGYDLRLDGSLVGLEAAHIKWKQFGGPCLVENGLALCTLHHSAFDRGAIGIDENLKIKISDGVNRSPVVEQLFWARDGESLYLPRNRQYYPADRFIEWHQTQVFKTZ

SEQ ID NO: 3189 - protein, 156 aa, Photorhabdus luminescens
ATSNTSVAEWYPPPTKNAKVAIANFFLSTIVISGNKISAATKTQDVLPDTDPINGESQSKVLLTNTDSTTLLSSASNSCVNVLNSGLRFVSSGMVKNDFCSSVRLSKVGVSKIPISERCWLLLILVLPLTLKRLVGLFFSIISFTSLPFPSKIKSZ

SEQ ID NO: 3190 - protein, 145 aa, Photorhabdus luminescens
VSHRFIASFLFNNIPSPLDIAFQRISGLSRELQTTQHSQGGENARNVWLAEKIQHGSLVLERGVMTITPLTLIFDRVLRGEKAVYADVVIMLLNENFLPVASWTVSNALPVRWSTGDFDANSNAVLVNSLELRYQDMRWLGVKAZ

SEQ ID NO: 3191 - protein, 150 aa, Photorhabdus luminescens
MSTPVDQIAVQYPIPTYRFVVTVGDEQMSFQSVSGLDISYDTIEYRDGIGNWLQMPGQRQRPSITLKRGIFKGQSKLYDWINSISLNQIEKKDISISLTDETGSNLLITWNIANAFPEKLTAPSFDATSNEVAVQEISLKADRVTVEFHZ

SEQ ID NO: 3192 - protein, 190 aa, Photorhabdus luminescens
PTVIRQPFWQAQCIIVSNNPFHCDVDRQTPIFPAHSVSYHPFFPMCVHRRTQNPLTRFSLPKAGFSRRALVSVAPFSATGERRPTRLGGGRPFCGRGRQRARKRRPCDALRHCGFGLRMTLHDHAVLFCSGKPPGAARGGDGEHGNEQGACDCEPGAASAAGLGRGEVNERRPQADLPSGLLAGRWHGSZ

SEQ ID NO: 3193 - protein, 160 aa, Photorhabdus luminescens
RLQTTQQFQCPIGCQTTNDGRTRTRRKSGIKTIDIESQVNRHIANRLFYLSKQIIHTTVINLISIQHRKTIVPSMFSTNTNLYRMMRVDQPFIWRVIEHSTVIKLATVWIGISMSIKMNQSHFAEMFGMSAQQRQSNKMVTPKREHTLTGSQHFFSMSLZ

SEQ ID NO: 3194 - protein, 143 aa, Photorhabdus luminescens
MTRVPDTDLARLKQTVSLLGLARKQGRPMKKRGEDYVLRCPFHNEKTPSMVISPAKNLYHCFGCGAAGSVLDWVIQTEGVTLKIAIRRLRELAGLPDMDNAVVAASSLAAPPESCLSYTNILTRPRVIELFPHRLISIKNTTZ

SEQ ID NO: 3195 - protein, 664 aa, Photorhabdus luminescens
LIMKFTIDALILWPVNPNNNLRVIPFKSDKINIVHGISGTGKSSIISIIDYCLGASKCAIPVGIIRESVMWFAIKANIRGYKYLIARKTPSKRSVSNEYHLSPYPEELPLTLTSTHSDAVFKNKFNQLVNLTDLPLSENNEKTGFDGRASYRDMAAFNYLPQHIVANPYTLFFKADSYQNKERLKRVMPFALGIIDRQYMIREKERIDIQKQRDSLYKQQEVNKKALSSWAFDVDRLWKACVELGLLSETENQDTDAKVKSLNYINDIYTEGRIGDLLGTPNYEYTNRRLKALVAQGEEIQQHIDTLRIQIRNYEQLFSRGQGFTQAIQKEKEHIVGFDWLKNNLSPGGECIACGSKTNILSTVVDNLEKQISRINSISEVLFENPIADKEIDKLKKELRIQQDKLQKIRKEKFNLEKIDKSTNNSMNKVYVLIGRIQETLSSLKKVNNTDDISEKIKELDDQFNEIEKFFFQSNKSRTEYIVYQEINSLIEKYADNFRLERRGNIKLDKNELTLCFNVDNDRRNEFLWEVGSGANWMGYHLSVFLALHEFLSHKDRTRLPPFSFLVIDQPSQVYFPSAASGDNILDVMAEDESLQITRQNDVVATRRIFEMLAVAIEENNYFFQVIVLEHADESIWGQVKNTCEAACWKDEGDGLIPRSWSLZ

SEQ ID NO: 3196 - protein, 178 aa, Photorhabdus luminescens
VVVVYNNPFHCDVDRQTPIFPMPSASYHPFFPMGVHRRTQNPLTRFSPPKAGFSRRTLVSVAPSSATGERRPTRLGGGCPFCGRGRHRARKRRPCDALRHCGFGLRMTLHDHAVLFCSGKPPGAARGGDGEHGNEQGACDCEPGAASAAGLGRGEVNERRPQADLPSGLLAGRWHGSZ

SEQ ID NO: 3197 - protein, 156 aa, Photorhabdus luminescens
LAVNVAMEWVVVDNNHLSVEKNQSRSEELVNCQGDSSCRSAIRDKYRQEYDKVQERIATCSGADQCVAVAKELRALQGDYSARMSEIQEKARMQGLDSLTPAEVREWADLRGAMSNIDASRNLVLRRLRRNYPGNREDYGADGNCGVCGDCWRDQZ

SEQ ID NO: 3198 - protein, 152 aa, Photorhabdus luminescens
MIYGDPFYFSLQFDAVESWNSSDGFWKNGIFFFYLDGHKIFDLLDVFELKTTFSFYSNMKIDELVCNDVNIGPVSLYRNAESYFTGDGENLIEGLFDMTCTPMGDNGYYVYFMKTSHNDRFVWSNDDGKTINETLLPSGTVSSVIKKLSNYZ

SEQ ID NO: 3199 - protein, 153 aa, Photorhabdus luminescens
LMFGIFPGDAPIRENDELVLPATIIIDTFTEAVHIPLSYWSFEDYKRSWRVSLEEGIHSKKPVALAVSMYEPDYTNFIFVWVIYFAGEEVFLQNSILFLDECPGFTPEKINNFIESRTTHNEDGMKISEWNTDLNSIIDFYNSLTISTESQSZ

SEQ ID NO: 3200 - protein, 139 aa, Photorhabdus luminescens
MSRKTQRYSTEFKAEAVKTVPENQLSISEGASRLSVPEGTLGQWVTAARKGLNTPGSRTVAELESEVMQLRKALNEARLERDILKKSTTVFCTGVAEKYALVEQWRQQFPVEAMCRVPGVYPHSRNIWNPAAPDGAGRZ

SEQ ID NO: 3201 - protein, 182 aa, Photorhabdus luminescens
ALAPERHKQGFTRQLFHHALSHGVTDNFARINIFDAGEIQPSFPGGNIRYICDPDLIRCCGRKVLIQQIRRNRQIVVRVCGRPELAFLLTVQPQLLTKTCQSVTTDDNSVICQLRLEPPGSICFASADIHQVPDTSLQQGIVVAIVRLTRIFQRLLCKIRWCFFLIYLAQVVLHLKPYAVAZ

SEQ ID NO: 3202 - protein, 144 aa, Photorhabdus luminescens
VVRAAQNRRLEEAPGKLFELPEVLATAGSHTLNVMQKGGRAARQARMFISYSEVSIKNPDNSGQALPLTYVCCREQAEDGACWHLLTSGKAASAADARRIVSHYERRWLTEEYHKAWKSGGTWNRCECRPGITLSAWWLSRRLZ

SEQ ID NO: 3203 - protein, 180 aa, Photorhabdus luminescens
AQGIIIRNNPFHCDVDRQTPIFPMPSASYHPFFPMGVHRRPQNPLTRFSPPKAGFSRRALVSVAPFSATGERRPTRLGGGCPFCGRGRHRARKRRPCDALRHCGFGLRMTLHDHAVLFCSGKPPGAARGGDGEHGNEQGACDCEPGAASAAGLGRGEVNERRPQADLPSGLLAGRWHGSZ

SEQ ID NO: 3204 - protein, 189 aa, Photorhabdus luminescens
PVTIGPQYFHHFATAAPEDEDMPGERVIFQRVLHLRSQAIEATTHICDASDDPDFGTGRQRYHRIPPFISRISARNSSGVRGSNSFTTPDLRCSSHRGTFPGAPSGRSSCLLRQKGFVTGLVGSGVSVSATGTGMHSCMSSSLSKPSSYWLFHLNSRLSLISCSLAIRATTAPGCNACLARRTLNSRLZ

SEQ ID NO: 3205 - protein, 406 aa, Photorhabdus luminescens
NKLMITQDASSKLIGFLYQFERALYRIFSSEHNSVVFGIETVDDVVEEAILASGLPSITFEQDKHSLDTRAQPYQDSSKNLWHTLHIWLDAMKVTRERYDEVTYCLVTNRIIDKKNLVVFLSEAKSEEQINTALAMLKEQAKKITGKVKSIAEEVLTYSDEELIFLIKNIELLDSHGTASGISPKEATIQLLHLPSEVKEHGDNIYQTLFGFMIDKCNTAWKVKQPVELTKEPFANLLNSEISLIKRKNFTEQPFFQTAFKNYLKQDNAEHLFIKQLQHIDISTTMCNRALEHYWAFYAERVRLQQAGEIPLSAWRARDDVLYNRWLQIKDCIELGLESEGNSQKLNMLKKIYTDTTDPNYTASLAGQRTENLYFTTGNYHDLANSPSKETFIHWHNDFLKIKEKZ

SEQ ID NO: 3206 - protein, 191 aa, Photorhabdus luminescens
MNNELPDDIELLKAMLRKQQSRLRQYACQVAGYEQEIERLKAQLDRLRRMLFGQSSEKKRHKLENQIRQAEKRLSELENRLNTARNLLEDASSVTDSPDTSPPSENPIASKPESPGRKSSRKPLPAELPRETHRLLPAETSCPACGGVLKEMGETISEQLDIINTAFKVIETIRPKLACSRCDVIGTTSSZ

SEQ ID NO: 3207 - protein, 162 aa, Photorhabdus luminescens
MGCVTAPEPLSSFHQVAEFVSGEAVLDDWLKQKELKNQAIGATRTFVVCRKGTQQIVGFYSLATGSVNHTEATGNLRRNMPDPIPVIILARLAVDVSFRGKGLGADLLHDAVRRCYRVAENIGVRAIMVHALTENAKQFYIHHGFKPSKTQVQTLFLKLPQZ

SEQ ID NO: 3208 - protein, 156 aa, Photorhabdus luminescens
MSLNITENESISTAVIDAINSGATLKDINAIPDDMMDDIYSYAYDFYNKGRIEEAEVFFRFLCIYDFYNVDYIMGLAAIYQIKEQFQQAADLYAVAFALGKNDYTPVFHTGQCQLRLKAPLKAKECFELVIQHSNDEKLKIKAQSYLDAIQDIKEZ

SEQ ID NO: 3209 - protein, 198 aa, Photorhabdus luminescens
EEKFLRNFGIRSVRVLPIILPIFSASFAAACLPTVATRTTAATRTRAPAIAPRIEPIILAFFESTPKPSSIFVNASERSLIKGSMTAFMIGFRACSMKELPVAACTIASVTIRAKPTAASAREAPPEKAAATTLTIVKSAPSIFPTQPITLLSSSALRTSAAYSSDFLSISIFLDSWRDWNRARSFFKDSSLFFPTSZ

SEQ ID NO: 3210 - protein, 199 aa, Photorhabdus luminescens
QFSDNVNYHYRFNINSCAKFLAFWDYFSGALVEHSHAEKCIHFYHENDLRDSCNTESMLDKLMLRFIFSSDQNVSNALAMIRMTESYHLVLYLLRTIEKEKEVRIKSLTEHYGVSEAYFRSLCRKALGAKVKEQLNTWRLVNGLLDVFLHNQTITSAAMNNGYASTSHFSNEIKTRLGFSARELSNITFLVKKINEKIZ

SEQ ID NO: 3211 - protein, 143 aa, Photorhabdus luminescens
MIRHGSNKLKIFILSILLLTLSGCALKSSSNSEKEWHIVPVSKDYFSIPNDLLWSFNTTNKSINVYSKCISGKAVYSFNAGKFMGNFNVKEVDGCFMDAQKIAIDKLFSMLKDGVVLKGNKINDTILIEKDGEVKLKLIRGIZ

SEQ ID NO: 3212 - protein, 370 aa, Photorhabdus luminescens
MKSRAAVAFGPGRPLEVVEIDVAPPQAGEVLVKISHTGVCHTDAFTLSGDDPEGVFPVILGHEGAGVVVEVGEGVTSVKPGDHVIPLYTAECGECLFCKSGKTNLCVAVRTTQGKGVMPDGTTRFSYKGQPIYHYMGCSTFSEYTVVAEVSLAKINPEANHEEVCLLGCGVTTGIGAVHNTAKVQSGDSVAVFGLGGIGLAVIQGARQAKAGKIIAIDTNPAKFELARQFGATDCLNPNDYDKPIQQVIIEMTEWGVDHTFECIGNVNVMRAALESAHRGWGQSVIIGVAGAGQEISTRPFQLVTGRSWRGTAFGGVKGRSQLPKMVEEAMKGEIELKPFVTHTLPLERINEAFDLMHEGKSIRTVIHYZ

SEQ ID NO: 3213 - protein, 283 aa, Photorhabdus luminescens
MERIERHTCFGGWQDVYQHESTVLDCTMNFAVYLPPQAEHQKLPVLYWLSGLTCNEQNFITKSGAQRYAAEQGIILVAPDTSPRGEKVADDDAYDLGQGASFYLNATQNPWAPHYRMYDYVVSELPILIEAHFPVTTARAISGHSMGGHGALMIALRNPDRYHSVSAFSPIVAPSQVPWGEKAFRAYLGEDRDTWKAYDTIELLANNAEPLHMLIDIGTDDPFLEEQLRPELLKDVCENTGHPYTLNLRTGYDHSYYFVSSFIGEHIAYHANVLKEICIDNQZ

SEQ ID NO: 3214 - protein, 528 aa, Photorhabdus luminescens
FCSSSIKYCYFSIVISSYRAPVLNHYLLFGWKYRGEGLSDVVLSKNHINPFQSQLEELDSKLVPIEGEAPSELKGTFFRIGPGRLHRGDEYYNHPFDGDGMIFKVTFSDNGIFYRNRHVLTKEYLKEEEAQRLLYRSVGTVPKKLKLRMRFFIIKNPANTNIVYHSHKLLALWEGGMPHLINPVTLETISKYDFSGKLKARFSFLPKLNLREVPFTAHPKKIPNDDNLYGFGVTYGIGSKLTLYKIDSAGDMMVIRKISLKKRYLIHDFIVTKNYFLFFLGGPHINLKLSNVIGNESIIASMNSRESEDGRVLLVSRKCHDVKFYDAVPGFIFHFANGYEDADGNVIFDASFWRSFPVFTQNIFKNNSSELCRFTLCTASGNVDKEILFRGNTDFPAINPTVCGRQHRYAWFVCWEDSDSEGRSIIKFDCFDKSVLSHSFDNDLPEEPVFVAKPGAVKEDDGWLIFKVYVEKLHCTDIVVLNADDLSMVCRLRLPHHIPMGMHHCWINEVMLYPMDFKMHRDGKEATZ

SEQ ID NO: 3215 - protein, 352 aa, Photorhabdus luminescens
MSGEKTEKPTPKKLRDARKKGQVTKSNEVVSTSLILGLIGMIMVMSEYYLEHLSKLMLIPANLLEKPFPQAFNHVVENLMQELVYLCLPILSVSALLSLVSHFAQYGFLLSGHSIKPDIKKINPVEGAKRIFSIKSLVEFIKSILKVGLLCTLVWITLAGNLQALLRLPECGTRCIVPVLGIMLTQLMTVCGIGLIVISIADYAFEHYQHIKQLRMSKDEIKREYKESEGSPEIKSKRRQFHQELQSSNMRASVKNSSVIVANPTHIAVGIRYKKGETPLPLITLKFTNAQALQVRRIAEEEGIPVLQRIPLARALYQDGLIDQYIPADLIQATAEVLRWLEQWQDRPPEPZ

SEQ ID NO: 3216 - protein, 332 aa, Photorhabdus luminescens
RVYKPEAYCNISLSLFFKWLSEIIYVIREIFMNVSTARAMNYEETLLELQSALQQHLELVLPSGAPDDKVCAAMRESTLVSGKRIRPLLLLLIVLDLGENPWKTDFLQLASAIEIVHAASLILDDLPCMDNAEYRRGRPAIHRQYGESVAILAAVALLSRAFGLIVETNLSEYDKSAAVAILSHTVGLNGLVQGQFRDLNNTLCAGNYHAIATTNDLKTGLLFDTTFQLAAIAVNAPDIIRQALRHVSQHLGQAFQLLDDLSDDLNNTGKDMYQDKEKLTMVTLLGKSKVHKQLRRHIRYIDKYLAIVYRRNLASRYFIRHWFDKNIAMFNZ

SEQ ID NO: 3217 - protein, 295 aa, Photorhabdus luminescens; identical to SEQ ID NO: 1209

SEQ ID NO: 3218 - protein, 197 aa, Photorhabdus luminescens
MIEADALIIHLNPLQEALQQGGDRNWCHILYAIEQLVTKLGVPIIVKEVGSGLSLPVARQLAEAGVSMLDIAGAGGTSWAAIEAERASTPYHRALAMAFADWGIPTATALREIREALPNMPLIASGGIRNGVDAAKAYCMGAQLVGQAAAVIHSAALSTDAVIEHFQLIIEQIKVACFCTGSADIAALRTAVLLPTZ

SEQ ID NO: 3219 - protein, 392 aa, Photorhabdus luminescens
MMYDWDLILVGGGLANGLIAMRFQQCKPHLRVLLIENTETIGGNHTWSFHQHDLTEAEHEWIAPLITYRWSGYDVIFPAFQRTLPHSYFSITSQHFASILHAYLGERIQTRLLVQELTPQKVYLQDGSSLSAGAVIDGRGWRPGPFIGSGTQAFFGQEWELEESHSLTHPILMDTSVGQDTGYRFIYVLPFSSTRLLIEDTHYVDRGPPDKALSQATIAEYAKKHGWKLGKLIREESGCLPITLTGDFTSFWAQLAGQPTCGLRAALFHPTTGYSLPHAIRLADRIVALPELTDTSLFITLRDYARQQWQHQRFFRLLNRMLFLAGDPQQRWQVMQRFYQLSPNLIARFYAEQLNSVDKARILIGKPPVPIKGALKAMFKQHKKLQGFYYDZ

SEQ ID NO: 3220 - protein, 494 aa, Photorhabdus luminescens
MIKALVIGAGFGGLALAIRLQSAGIPTCILEQRDKPGGRAYVYKEQGFTFDAGPTVITAPNVIEELFTQAGKRMADYVDLLPVHPFYRLCWESGKMFDYDNDQQHLEAQIHTFNPRDVNGYRRFLDYSREAFNEGYLKLGTVPFLSFRDMLSAAPQLIRLHAWRSVYSQVARFIKDESLRQAFSFHSLLIGGNPFAASSIYTLIHALEREWGVWFPRGGTSALVEAMVKLFTDIGGEIELNAKVKRFTTHGNRVTGVQLADGRNMTCDVVASNADVIHTYKHLLGQHPVGIARARTLVRKRMSNSLFVLYFGLNHHHTQLAHHTVCFGPRYKELIEDIFYHDRLSEDFSLYLHAPSVTDPSLAPRGCASYYVLAPVPHLGTANLNWDIEGPRLRDRIFAYLEKYYMPGLLKQLVVHRIFTPFDFRDQLNAHLGSAFSFEPLLTQSAWFRPHNRDNRIDNLYLVGAGTHPGAGIPGVIGSAKATATLMLEDIAKZ

SEQ ID NO: 3221 - protein, 309 aa, Photorhabdus luminescens
MNPALLKHVTQIMEQGSKSFASVTRLFDTATRHSTMMLYAWCRYCDDIIDGQELGRQISSVDKYSAREKLQMLQYLTKQAYDGLPMTEPAFAAFQTVALSNEIPQQQAFEHLEGFAMDVLCEPYRTLDDTLRYCYHVAGVVGLMMARVMGVREASVLDRACDLGIAFQLTNIARDIIEDAKAGRCYLPLEWLHQEGLMPDTLIYTENRPALARVASRLIVEAESYYTSALTGLVGLPLRSAWVIASAHGIYREIGIKVQQAGVRAWECRQRTNRGEKVTLLMAGAMKALISRVAITTPRDPKLWQRPHZ

SEQ ID NO: 3222 - protein, 1053 aa, Photorhabdus luminescens
MKIKKVEIQAFKSYLEKKDGTFDFIHSTSGEPANFVSLFSPNGFGKTSFFDAIDFAITKKISRYVRNERLEKINLEESNQYNIKGESQLIIRNKNAPKNIETRVEVITSKSEKPFISSYKKGRKGSSDWRIQSKSITNKYFESSMLYQESIDSFLRETDSETRFKKFSEVDDELVNINSARSTLLSLKSDVSKKKQELVDTKNKLSSEINRQKDNKDYVHSINIIIKDVNEYLDEIKIDEVIAPFTKNEHFHLSARLKEAENIIKNRVKENDEKLSKIEVNLSQLKLGASIYYKYKECINERSLILDKIKFYDEVGALKESFNTLEKELLLNQDVILSLRELNKNAHEYFTYKLKLDSTLKEIEELKLKLKMNDALIKSLNDSLNEKIIFHQKVCENIDQLGKEQANLYFVFNTIKDKSTSLDGVEKELANMEIEIKKNKGQKDVADICLSSLEKLTLFDFKWLPEFFIIHEDNKNELSDIYAKYCYVYKSKVEIDGKIKSINKELESINQQQTDISFLIDKASSIVISTKQSHCPLCERDNETYDELISRINNNSMLSDIEKKKNASKSSLMEELEQLSMKLDRFNVEFIEKKKSISNGLKDEISSLENLINESSQKKSTLVESKNIFISEINKFNSSVMFMSKYDYSKHLISKVQCERDREHSISKEIEDIKESIKSRVNQIELNKKIIDLENERFKLVVHLSKYSDFIKSNQLSEGVNKDDFISFVMLKTDKLNDSQKGLKDRIGKIVIKINKLESENKDSQFKGVSKEKMNALLVDLEDKMSLLSKENQWFISVADSFDNEDNSVVYTKVKDSLELQVTGINVKNRTLSDCLAKFSSIESISSKIVDYSDTSLLEKELYSISSKVSKLSEVIVELDSDIRKLGNEIKLRVDSFFNTELINKIYSSIDPHPEYKKIVFTCTSDDNPRLLISAQSEKNDKLMSPTLSFSSAQINVLALSIFLARALSSKDDEGNPVDCILIDDPVQSIDAINTLGLIDTLRMLSIMFNKQIIVTTHDENFHELLKKKMPSDLFSSKFLRLSSFGKVSSDAZ

SEQ ID NO: 3223 - protein, 292 aa, Photorhabdus luminescens
GHWENRCLAVNFAMEWVVADNNALGAAAGSDLGFWLAKTPDCDTACKSNIAKGIANGNLIVSVGGMAVAGGAQIVAATPEIAAMARAALEGCKAAPTICLNNAGIQVAEALTPGGVGAAGVIGVGKTAAEAVAAKSEAVAANVVKNVSKNLEQGVSKTIKSYGPHEIGPLGNPNDLRAPASTFRSGSYTEKVAETDIYFFRDYGGSAKVDGRFWTPQPSKGPLQSQLDSAVLPEWGNTFKNQAIIKIPKGTKYYEGPAAAQIGTKGTQPTLHGGGTQIFLPSLDNNWIIKKZ

SEQ ID NO: 3224 - protein, 321 aa, Photorhabdus luminescens
YLISSTLAGGIAGDSTASALTGAQAGKNSVDNNALSMGSLFGSESAKHFEGAGSLAQKMTQSGATPEEINAALTHYLKGQVPEGQDPAKGLIIAWGNFFGVPLDVVLSNEQMTPQKAAEIVAGGIPTSEAKLIQFAAAKAYLSLSKYRSTEVVEGKGGSLADKSITGNKTTISSINEGKGTSGRLPEKPIKEVTATEVNNWWKSQGYEQPPYTPGTTVKEFELAANTQFVRVYDGTHSQMRGGWMMKAEDIKGLSSKQIQEKFALPYEPKYVADVEIKAGTKMRVGSANSLFGYKGGGTQFDLMGQRTGTFTNEQAIQKKZ

SEQ ID NO: 3225 - protein, 293 aa, Photorhabdus luminescens
FLWKKNIFRSSYWPILITRCCKIRLRIMRWPPEIWAIAARCHRKPCGKAKELSQRILDKGLPSVEDMRGKLASCQDDSCRKGVWTAYRQASDATINTLKQMALNGELSREELAFINHEVGKELAVSGYRANDKLGRSEQSSWLNGGSGPLSGFFNTELRQKELENAGLSKADAAQYVKEEQRNLVLLETAVGAIGAKANRTSVNIVGKGTTQTGKGTTLPAGYTPKGNSVTRPKNGVYNNTGKIDASGNTIYSHNGGYYTFENGVKTRVQSVAVGIVVTGYPPPRTDPDVRYZ

SEQ ID NO: 3226 - protein, 273 aa, Photorhabdus luminescens
MNGITTSGKGMDISRLQRSMPAFNVIEHPQEGIYILLEGEMTWQDSTNTYDISHNELLFVRRGSYAAKTRSDTCKLLWLPLSTTFLHGFLQRFGTLLSEVERHNMSTPELIAFTSSPLLSQSINGLVDLLAHDYPTALGQLRTEELLLLLAFGEQGTLLMSVLRQLSNRQVERLQSFMENHYLKEWKLSEFAKEFGMGLTTFKELFRSVYGISPRAWISERRILYAHQLLLNSEMSIVDISMEAGFSSQSYFTQSYRRRFNCTPSRARYGKEZ

SEQ ID NO: 3227 - protein, 295 aa, Photorhabdus luminescens; identical to SEQ ID NO: 1209

SEQ ID NO: 3228 - protein, 1792 aa, Photorhabdus luminescens
SRDRLKAGAVYVPIDPDTPDERKLWVIQDCAAQLLLTDNHMAIPNNLAVPLLRMREETDPGREDDERDLNLTRRGSDAVYVMYTSGSTGVPKGVIVSHRAVIRLVINNGYAEIEPDDRVAFTANPAFDAGTFEVWAPLLNGGALVVIDRSTLLTPWQLVRALQSHCITVLSLVVGLFNRLAGELSPVLPQIKILIVGGDVLDPNVIDQVLTGNPPQQLLQAYGPSEGTTFTTTYRITALAQGITSIPIGRPIANTRVYVLNAKGLPVPLGAVGEMYIGGDGVARGYLNRPELTAERFLADPFSDKPDARMYRTGDLARYLPDGNLEFLGRTDQQVKIRGFRIEPGEIEARLAEHPAVREAVVLAHGKGLDKRLVAYVAADVEEGLVNNLRERLSQVLPEYMVPAAVVRLDRFPLTPNGKLDRRALPVPGEDAFARQRYAAPQGATETALAAVWRELLGIEKISRHDNFFALGGHSLLAVRVIEHLRQQGLTLAVRDLFQTPVLANLAQKLAQYAAVPVPANVITPDTCTLTPAMLPLINLTPADIDRIVGQVPGGLSNLQDIYALSPLQDGILFHHLLASEGDPYLLTGQMVFAAREVLDRYLAAVQQVVNRHDILRTAFIWQGLSEPAQVVWRQAPLSVTELTLDPADGPVSEQLSRRFDPRHYRLNLSEAPLLQFVVARDTEGRWCLLELQHHLIGDHTTLEVLHREIRAFLTEQAETLPAPVPFRNLVARARLGRSQEEHTRFFTDMLSEVTEPTLPFGVAEVHRDGSQVTEFHRMLPAELNDRLRRQAQQLGVSLATLCHLAWAQVLSRTSGQEKVVFGTVLFGRMAAGAGAGTGMGLFINTLPLRLDIDNTPVRESVRQAQSRLAGLLAHEHASLALAQRCSSIDNAGPLFSALLNYRHNDVSALSDEGLSGIEFMGGQERTNYPFALSVEDFGTALGLTAQVVEPFGPERVCDYMQQALDSLAEALAHTPDRPVRALDILPAAERTLLLTTWNATETPYPEDLCIHQLFERQAATTPDAIALVYENQSLSYAELNARANRLAHQLITLGVVPDQLVAICVSRSLVMVVGILAILKAGGAYMPLDPAYPDERLAYMFEDAAPVAVLTQTEWVDRLASTVPTVVLDAQTQLWMSYSTDNPDPQVLGLTSHHLAYVIYTSGSTGQPKGVMNSHQALCNRLLWFVRNIATTPLVGALKTSISFVDSVTEMLGVLLAGGKLVVFNDHEVKDFDRFSDGLRRFGVNYLVVVPSLLKHLIQGYSDKLKSIRTLVCSGERLAPELARQVVTDYPWLRLLNFYGSSEINGDATWYEYPTQTEIPEVSVIGRPIANTQIYLLDPIGQPVPLGVVGEIYIAGAGVAHGYLNRPELTAEHFLHDLYSDKPDARMYRTGDLARYRPDGNLEFLGRNDQQVKIRGFRIEPEEIEAQLMEHPAVRGSVVLALDDGSDKRLVAYVMADAEEGLVNSLRIHLNSVLPDYMVPAAFVRLESFPLTANGKLDKQALPAPDSDAFARQHYEAPQGATEILLATIWHKLLGIEQISRHDNFFALGGHSLLAVRMMNLAAGQGLNFTLNTLFQFPVLVELAVKITLDPLLQRQNSAISVRPGGTGLPLFLIPTGTGDYSYAFGLSQYISSGYPIYALPWPSINEEPMSTMEELAAKMVTLMKAVQSTGPYRIGGYSSGGILAYAIAQQLLNAGEQVNFLGMIDTLAPHYLREDPLQPKYRFLVGLTQRLEGEHLEEISVLHQNIEALNLVQLIEAAQELELYPATLRADVVAKYWEQIARYAQLIANZ

SEQ ID NO: 3229 - protein, 461 aa, Photorhabdus luminescens; identical to SEQ ID NO: 1083

SEQ ID NO: 3230 - protein, 4984 aa, Photorhabdus luminescens
MKDNIATEGNMFKSEVLSQKLDENTPHHTDETPIPSRKCVVVGGTSLAVSCAEQIQSAGHIIQAVLSTDSVLQTWAEQQGIDWVNSVEELQEHIQLQPVDWLFSIVNPLILPASLIKQIRGGAFNYHDSPLPRYAGSHATSWALLAREIAYAISWHCIEGAVNGGNIAVQWPVSIEEQDTAFLLNLKCYQAAQKGFNELLTALSHDTLITYPQNLSQRRFYALSHRPEAGGYLCWKQPGEVLSALVRALDFGENDANPLGYPKLLLKQDTVRISWLQRLGTCSGEKPGTLIRVEEEGWQVSTGSEDVRIGGFSTLEGQLLSVRELTEISELQPGEQLPLISPQQAQNIKNTLQKFAPDEPFWCQRLTGWQPSHLPFDISHKTAEPRWAISPWQSAFSQKSQEATWKTLLQAFVIYLTRLTQQTVCQVGWYVGANEELSNMASMVPMTVEAEFNKPWSEVVVAVDNELALLAQHGTYSRDLFSRFPALSVIPELRTCYPWPIAVSVVPDSRLGDQERSSELLTFQINTQGGFRWIYDENRLDTAVILRMSEHLQQLLSLEKTNEAIPIGQLNLLSETERMLLLKTWNATAMPYPEDLYIHQLFEQQVAKTPEATALVYENQSLSYAELNTRANRLAHQLIALGVEPDQRVAICVSRSPAMVVGLLAVLKAGGAYVSLDPSYPVERLAYMLNDAAPVVLLTQSVLADSSKHAFSAADYTIVLLDAPDAAQVEQPDHNPEPQTLGLTSRHPAYIIYTSGSTGLPKGVEMPQAGLLNLLQWHRQSPSQPAGNGKTLQFAALGFDVAFQEIFTTLCEGGCLVLINESLRRQPEQLLRLISQQRIDRIFLPYIALQHLAEAASHSGEDFSCLAHIVTAGEQLRITPAIQRFLQRAEGCRLHNHYGPTESHVTTAYILDQDPNRWPTLPPIGRPIANNRIYILDTCGQPVPLGGLGEIYIAGQGVARGYLNRPELTAERFLADPFSDKPDARMYRTGDLARYLPDGNLEFLGRTDQQVKIRGFRIEPGEIEARLAEHPAVREAVVLARGEGLDKRLVAYVAADVEEELVNNLRERLSQVLPEYMVPAAVVRLDRFPLTPNGKLDRRALPVPGEDAFARQRYAAPQGATETALAAIWRELLGIEKISRHDNFFALGGHSLLAVRVMNRIMTVLGVELPLAALFHSPSLAALAQAAQKQDRPALPAILPVSRTETLPLSLAQQRLWFLAQLDGVSETYHIPLALHLRGRLDIAAWQQALNAVFARHEALRTVFVSVDGQPQIHLLAADDGLPLVQHDLRGHPDADTELERLCAGEMSAPFDLSRGPLIRAELIRLTEEDYRFLLTQHHIVSDGWSVNVLINELNALYAAFLAGQPDPLPPLAIQYPDYAAWQHQWFSAERTQVQSDYWRTTLADAPVLLALPTDRPRPPEPSFAGQILPVHLGPELTTALKQLSQQHGVTLFMTVLSAWGVVLSRLSGQEDIIIGTPSAGRSRQEVESLMGFFVNTLALRMHFSGALTVAELLTQVRQTALAAQAHQDLPFEQVVEIVQPPRRLAHTPLFQVMFAWQSNEHTDWALPGLMASPIDQTLDTVKFDLELDMFEDNGAISGNLRYATALFDQTTMERHIGYLRTVLQVMVANHQQRIGEIDILTSAERRLLLETWNATETPYPEDLCIHQLFERQAATTPDAIALVYENQSLSYAELNARANRLAHQLITLGVVPDQLVAICVSRSPAMVVGILAILKAGGAYVPLDPAYPGERLAHMLTDAAPAIILADETGRTALGEKALAGRKVLDPNSLPEQPDSNPQIAALIPCHLAYVIYTSGSTGAPKGVMVEHQAIYQRYLGLNETYAVTAQDRILQFSSFAFDASVEEFFSSLCHGATLVMRDDNWLSSIQAFISLTQQNRITVMSLPTLFWSELAGRDKALRLPDCLRLIIIGGEEMKTRAIQNWFAQETHHPRLLNTYGPTENTVIATCQAILSSEDDGSIGRPVSNTCIYLLDRYGQPVPLGCIGELYIGGVGVARGYLNQPELTAERFLADPFSGKPHARMYRTGDLARYLPDGNLEFLGRTDQQVKIRGFRIEPGEIEARLTEHPAVRDSVVVAQGEGQDKRLVAYVVAEAHVELANSLRAYLQAVLPDYMVPAAFVRLEALPLTLNGKLDRRALPVPDDDSFARQAYAPLRGETENALAVIWGDLLGIEQVSRHDNFFALGGHSLLAVRMVERLRQLGLTLAVRDLFQSPVLSDLAQTLGQHQTLEIPPNMITPTTRQLTPAMLPLVDLTQADIDHIVRQVPGGMANIQDIYALSPLQDGILFHHLLANEGDPYLLTSQMVFADRALLERYLMAVQQVVDRHDILRTAFIWQGVSVPAQVVWRQATVSVTELTLDAADSPVGEQLNRRFDPCHCRLELSQAPLLQFVIAREESGHWLLQELHHHLIGDHTTLEVMHREVQAYLAGREENLSAPVPFRHLVAQARLGVSQAAHTRFFIDMLADVAEPTLPFGLTEVHRDGSQVTEFHRLLAPELNDRLRHQARQLGVSLAALCHLAWAQVLSRTSGQEKVVFGTVLVGRMAAGEGADSGMGLFINTLPLRLDIDNTPVRESVRQAQSRLAGLLAHEHASLALAQRCSGVASGTPLFNTLLNYRHNAPLAATDNMMEGVEFLGGQERTNYPFALSVEDFGDALGLTAQVIRPFNPEQICGYMQQALESLAEALEHTPDRPVRALEILPEAERTLLLKTWNATETVYPDQLCIHQLFEQQVGRTSDATALIYEEQTLSYAELNARANRLAHELIVLGVVPDQRVAICVARSPAMIVSILAVLKAGGAYVPLDPSYPGARLAHILDDIAPLVVLADKAGYAALDEKALDGVIVLDPNTSVNQLDSNPTVPTLTSRHLAYVIYTSGSTGTPKGVMVEHRGLVNLIQEKITQFSINPESRVLQFASLGFDASIWEIMIALGGGASLVIAADTVRYDPHRLWHYLEQQAVTHITLPPALLQNGANLPSLTIRPTVILCGEAPNAVLLQELCDRVILFNAYGPTESTVCATIWRCPSGYTDALVPIGYPTANSQVYLLDADGQPVPLGAVGELYIGGVGVARGYLNRPELTAERFLPDPFSDKPDTRMYRTGDLARYLPDGNLEFLGRNDQQVKIRGFRIEPGEIEARLAEHPAVREAVVLARGKGTDKRLVAYVAADAKAGLVNRLRARLSAQLPDYMVPAALVRLDRFPLTPNGKLDRRALPVPGKDDFARQLYAAPQGTTETALAAVWRELLGLEQVSRHDNFFALGGHSLLAVRLIERLRQLGLTLLVRDLFQTPVLSDLAQTLGQHQTESVAVPANVITPDTTTLTPAMLPLIDLTQTDINRIVEQVPGGLSNLQDIYALSPLQDGILFHHLLASEGDPYLSTGQMVFADRAVLDRYLSAVQQVINRHDILRTAFIWQRLSEPAQVVWHQAPLSVTELTLDPADGPVSEQLSRRFDPRHYRLNLNEAPLLQFVVARDTEGRWCLLELQHHLIGDHTTLEVLHREIRAFLTGLAETLPAPVPFRNLVAQARLGLSQEEHTRFFTDMLSEVAEPTLLFGVAEVHRDGSQVTEFHRMLPAELNDRLRQQAQQLGVSLATLCHLAWAQVLSRTSGQEKVVFGTVLFGRMAAGAGMDNGLGLFLNTLPLRLDIDNTPVRESVQQAQSRLAGLLAHEHASLVLAQQCSGIDNTGPLFSALLNYRHNAVSALSDEELNGVEFMGGQERTNYPFTLSVEDFGDALGLTAQVVEPFDPARICGYMQQALESLAEALAHTPDRPVGALDILPAAERTLLLKIWNATETLYPEDLYIHQLFEQQVAKTPEATALVYENQFLSYAELNTRANRLAHQLIALGVEPDQRVAICVSRSPAMVVGLLAVLKAGGAYVSLDPNYPVERLAYMLNDAAPVVLLTQSVLADSSKHAFSAADYTIVLLDAPDAAQVEQPDHNPEPQTLGLTSRHPAYIIYTSGSTGLPKGVEMPQAGLLNLLQWHRQSPSQPAGNGKTLQFAALGFDVAFQEIFTTLCEGGCLVLINESLRRQPEQLLRLISQQRIDRIFLPYIALQHLAEAASHSGEDFSCLAHIVTAGEQLRITPAIQRFLQRAEGCRLHNHYGPTESHVTTAYILDQDPNRWPTLPPIGRPIANNRIYILDTCGQPVPLGGLGEIYIAGQGVARGYLNRPELTAERFLADPFSDKPDARMYRTGDLARYLPDGNLEFLGRTDQQVKIRGFRIEPGEIEARLAEHPAVREAVVLAQGEGLDKRLVAYVAADVEEELVNNLRERLSQVLPEYMVPAAVVRLDRFPLTPNGKLDRRALPVPGEDAFARQRYAAPQGATETALAAIWRELLGIEKISRHDNFFALGGHSLLAVRVMNRIMTVLGVELPLAALFPSPSLAALAQAVQKQDRPALPAILPVSRTETLPLSLAQQRLWFLAQLDGVSETYHIPLALHLRGRLDITAWQQALNAVFARHEALRTVFVSVDGQPQIHLLAADDGVPLVQHDLRGHPDADTELERLCAGEMSAPFDLSRGPLIRAELIRLTEEDYRFLLTQHHIVSDGWSVNVLINELNALYAAFLAGQPDPLPPLAIQYPDYAAWQHQWFSAERTQAQADYWRTTLADAPVLLALPTDRPRPPEPSFAGQVLPVHLGPELTTALKQLSQQHGVTLFMTVLSAWGVVLSRLSGQEDIIIGTPSAGRSRQEVESLMGFFVNTLALRMHFSGALTVAELLTQVRQTALAAQAHQDLPFEQVVEIVQPPRRLAHTPLFQVMFAWQNNEHTDWALPGLMASPIDQILDTVKFDLELDMFEDNGAISGNLRYATALFDQTTMERHIGYLRTVLQVMVANHQQRIGEIDILTSAERRLLLETWNATETPYPEDLCIHQLFERQAATTPGAIALVHENQSLSYAELNARANRLARQLIALGVRPGGHIALLFERSIALVVAQLAVLKACLSYTNILTRPRVIELFPHRLISIKNTTZ

SEQ ID NO: 3231 - protein, 207 aa, Photorhabdus luminescens
NEVICPLAATMGAGFNGKSRMSGDVHVRFRERLGGRFPGATRPVLGFQKHQDALACQSLLQRRLMQFGLKVHPAKTRLVRFGRFALKQYEERPERGKPGTFDFLGLTHYIGRLHTGKDAVMRKTQRKRCQTQLKRIKQGLRQRLFLPRPIEVITDMAVNGGLMESQCLGYHHRTPPFRSQKDSFYSVSYLTITSCVVKTLKFDFLFZ

SEQ ID NO: 3232 - protein, 479 aa, Photorhabdus luminescens
EGRNASGGPMSARVPMRGTGAEQAVVALKDRNGSGAKGLPHCADGTTATTGDKAGGRTAVKSAKPFPVSKRQVWDAYKRVKANRGAAGIDGQTLAGFDENVADNLYKLWNRLASGSYMPQAVRRVEIPKADGGVRPLGIPAVSDRIAQMVVKQVLEPVLEPLFHADSYGYRPGKSAHQAIAQARTRCWQFDWVVEIDIKGFFDNIDHALLLKAVRHHTQERWLVMYIERWLKAPVQMPDGRVQVRNRGTPQGGVISPLISNLFLHYAFDMWMKRQFPGVPFERYADDVVCHCHSQSQAEALISKAGQRFAQCGLELHPQKTRMVYCKDADRRGNYAETRFDFLGYTFRPRLSKNRWGKTFVNFSPGMSARAGKAIRQEVRSWGLQNRSDKSLYDLAHMFNAKIRGWINYYGAFYKSALYPTLRQIDRKLVLWLTRKHKRLRGHRRRASHWLARVARSETRLFAHWPLLWGQASMGRAGZ

SEQ ID NO: 3233 - protein, 222 aa, Photorhabdus luminescens
TSVCPGLRGYHMGKLGRKSAKQPPCAPRQTSSGAIQAPAGKAGDDPERRRDRKAMSILCLEDKIVQQAAVTVLNQIYETDFLGFSYGFRPGRGQHDALDALNVAVMERKVNWVLDLDISRFFDTVEHDWLIRFIQLRIRDGWMVRLIRQWVTVGIVDEHGHRQKSHCGTPQGAVISPLLANIYLHYSFDLWLNAWRKRVQGEVVMIRYADDGVPRRHAPGTZ

SEQ ID NO: 3234 - protein, 216 aa, Photorhabdus luminescens
PQNGMLTERILRLERFALNPLAVGLDAGYFTAPVCYLTEQLGMTPIIGYRRPNKGPNTFQKKHFTYDRQQDCYVCPQSKNLIYTTTDRQGYRHYQAPATLCQSCPQRDACTHAKGGKMLTRHVWEASKEQARENRLTPWGKKLYKRRKETIERSFADAKQHHGHRYARFRGLQKVQIQCLLAATAQNIKKIALLVAMLCCFYLWRASILLQEKRKZ

SEQ ID NO: 3235 - protein, 388 aa, Photorhabdus luminescens
LHRNQMSNKLLNVADYRTLAKKKLPKIIFDYLEGGAEDEKGLRYNQQIFDRWRFIPHRLIDVSKRDISCTLFNKVWSAPFAIAPTGLNATFRPNGDLILARVAAKENIPFILSSAANMTIEDVARQCDGEKWFQLYVVCPELAEQMVKRALASDYTTLVITVDVAVNGYRERDIRNQFCLPLRYRPAVLLDGCLHPSWLLRFLCNGMPQLANFVMTENIGVDVQVAVMSRQMDASFNWQSLEQLRALWPHKLLVKGLVRPEEAKKCIELGADGVILSNHGGRQLDGTLSPMETLSATVQAMYQPVLIDSGFRRGSDIVKALALGANMVLLGRAVLYGLAATGEQGVSEVIRLLKEDIERTLVHIGSPSIRGLTPDFVHNCWQFATVKZ

SEQ ID NO: 3236 - protein, 435 aa, Photorhabdus luminescens
QETLMPLAIEASDLAFQEHADLNTMCFLNEVIERYPNAISFASGRPSEINARPEKWSQYIALFSHYLAGARNKSHQEIGNLLGQYGDTRGIINPLIAKQLYLDEGITLEPEEILVTNGAQEGMVICLDTLFSPAHDVLLVTDPAYIGITGAARIKGIDVVYVECDSEGPIISALEYSINSIAASGKRARAIYTIPDFSNPCGRTMSLARRKELLVFCYARELFILEDSPYRLFDYTHHQQPTLLALDNEAVVIHIGTFAKTLCPAVRIGYLICRAHVKRGELAVPLINDMTRVKSFISVNTGQITQAIVGGFLLENNCSLKQITQNISEHYRAKRDRLLHSLTCFFAEKDSTISWNMPNGGFFLNLSLPFNLTMQDIERCAAEFGVIVVPTAIFSNSDRYNNVLRLSFSYVESDLIEEGVRRLSCFIADRRKNSZ

SEQ ID NO: 3237 - protein, 278 aa, Photorhabdus luminescens
MSQQDHNQTRTSMFLGRKISVTQSGIPRRDQLLGKSSAIQYQNRDIINSQQFILLQRLLPRHLLESLMKSVWFRRRLNCGQALRRDDLQQLIRAAAELECDWNKVLGDRINLADRHLLQHWVLQPLFDWWLRLLEPEIDFWFTEFDQLQIQERQLHAKAHFWQQAESVSSQCREQQHKEVTSLQTALNQRKQLLEKRLLTTETQAREAWPNWFTGLDALQTGGDLTAFMPVPEALSSCWAWLTTLEHDTEAATHLQKWLCARFLCLPQDNFHWQSTTZ

SEQ ID NO: 3238 - protein, 516 aa, Photorhabdus luminescens
VCHVLRLRRSVMTTYSYLEYFLTLLGWIVNNGLWNVLLATGLFVLPLTFKMIGIWLKVREEGEDEGNKGMLSVTRIENTLYGAFLVMIACCVPLVNVSLSTITYDDSRAKSCGTWTPKPAETGYASVISSLDGKTAAAPVWWILVHQISKGVTQAAIASLPCSPDLRQLRFEVQHTRINNPALAQILQDFTHGCYALALYQWKRRDEGRTLDEVVLRDIEWLGSKTFLNSAGYYDVLQSKTPRSDFPWKPHRDDGFANTGQGGYPTCKEWWSDSQVGLEKRIMAQVEPSMWFRLSAALKLMGKETSEYKEAVIRRLVSPESLTASQGGHVYAGYGGNADFTLMNSVGRIASLGGVSLGSLAAFPAFDAMRQALPMVQAVILMAVTIILPLIIVFAVYEYKTVVTLTFIVFALNFLTFWWELARWLDSWLLEALYGSDTHSRWNMAGFQNSTDDIIMSFVMGAMFIVLPALWMGALSWAGIRVGGALENTALRHGTSEAQSSGARMGESVSNKIMKZ

SEQ ID NO: 3239 - protein, 481 aa, Photorhabdus luminescens
DWDHGMRQRLFLPVLIALAFMTVPVVRAAGFAIADSPIGYGKSLNGAVSDKLFYNIGGGSVISQPATRSHLQHLGGLNLGWSSDLMCGNFDLKTTVGNQLNGLTSGFKNLMGEVIQGATGAVASLPAMVIQRANPGLYEMLTNGVLQAGIAFDKSQLSCQNMSQRMMDFSDSSKWTKAALMEEYKTLVNTGNGDAVGTTQKMEVADGTQGSNWIGGEKRGGKGQKAIQPIRDLAKAGFNMMNNLPANSHANVNRTQCNGAACQKFKNSEEAADAVVKVLGDRSVRTCTDSRQCTSGDTKDQPGASVAGTGFAPMLEEATRTNIEQLMKLVSGENAPTIVNLAKLKTGSLMVTRGVIQALKRDPDSGALVSRLASELAMADTVETALTMRRMLMTGQAEPNAAAQAQAMAESDRRIATLDREITALKNEMELRRAIAQNTALTTLEREQNRVEMNLQRQSTDNTDSRIHTLSVPPKGREGQZ

SEQ ID NO: 3240 - protein, 319 aa, Photorhabdus luminescens
SLSHPMIPVSKIGTVKKSLSTPLTTTVGLPQCKDIIPVLGRFPAVIRKNSTRGAHFRRYTLPLMILVNRILNDFARWPVTLFVVPLQGLINMPLSSTGDNVCYPLRYHRSRFIIILLCHKPASRINIAPHIAPKRITQFTFAWNKRFGIKRLWHTGPPNQAVQRTQKVRHKRRGGTFTRIPRNFSAHHGSCRMPNRIGIFKMQIVFSVAWDFQLMITAPHGYPGKCSRYGIFHAVNSLADQRHFSPGITARRVIDGDHGLRNKMRNFYRGTHFTPPGRTQQPVTETFYPPTDARYRRGTGHNLSRIHTSNGHWRQNNRZ

SEQ ID NO: 3241 - protein, 348 aa, Photorhabdus luminescens
TGPVTLGYLSAGKPAMKSLDLPSLTWHSRLKKFGMVLILTVVLAPVAVASVNTAQIVSSAASVSCISWRIKGLCYWLLCSPWGCKVRTSIKVAHFIPQAVVSVYNAPGGNPWREMSLVSQTVDGVENAVTRALSGIAVGGGNHQLKIPGNRKNNLHFKYADAIGHPATAMMGGKISGYACKSAATPFMPYFLSTLDSLVWRTGVPESFYPEALIPGKRELGNSFRGNMWGNVYPRSGFVTQQDDNKAAAVVAQRVADIITRTGQGHVYQSLQGNHKQGYWPPGEVVENTVNQNHQWQRIAPKMSTSCAVFPDNSGEAAKDGNYVFALWQPYSCCQRRGQTFLYSTDFZ

SEQ ID NO: 3242 - protein, 966 aa, Photorhabdus luminescens
TDGGIVMWSLLNKVRLRKWDNLSEVLGETEVILPSSSTVVGREPLRRPGKMTSTDEAALYDTWPSIIDYLPWVEYLDDEKCLLLDDGLSVGAIYAVSPVSTEGRTTARLEDIRDQVEDALQDSLEDDDVSPWVVQFFCQDEDDPALYLTQLRQYIKPWAQGSAFTEAWLAETERHLKGIARPEGLFNDSLVTGQSWRGQQRRTRMVIYRWAPVGQKESLLPIVLLNQVCDRLTASLASTGILCQRQNGEQVHHWLLRLFNPDPDWIDKATLYQAASYATPQAGERKPDNDFTETLWFTPPRSDVKNGVWWFDNIAHRAVPVERLRRPPEPGTLTGEMVRGENINALMDLLPSGTIVSLTVVAQAQDTLEQDFDRLSKNAVGENTESGRVRSDVKEAKAHLGLRHKLCRSALTFLLQGADVDDLNRRHQQLAATLLVSGLQPVKPECDVAPLNGYLRALPMCFNPQRDKHHWYTRLTWMQHVAGLLPVTGRATGTGNPGLSFFNRGGDVLTFDPQNKHDRTQNAHLLLFGPTGAGKSATLCASLSQLMAVHCPRLFVAEAGNSFGLFADYCQRLGLSVNKISIKPGCGVSLALFADAHQLLQVASSQLDLAGERSAEETADDEADEQRDILGEIELAARMMITGGEKKEEERLTRADRGMIREAIMIAARASFDDGRQMIAEDLQNALSVIARDSRRDEQGRALCTEQRRARAEEMAGAMSMFTSGFEGELFNRPGTPWPEADVTLIDLGTLAREGYSAQMALAMVSLVNTINNMAERDQFDVREINFVVDEAHVLTTNPLLSPYMTKVVKMWRKLGAWLWLATQNLADYPDTAEKMLNMAEWWLCLTMPPDEVEQIARFKKLSEEQKSVLLSASKLPGCYTEGVVLSKKVEALFRVVPPSVYLALGMTEKEEKAERRAIMKTLHCSELDAAFVVARRLDRARGLISGEVADGRDEDLLSMQECRLZ

SEQ ID NO: 3243 - protein, 499 aa, Photorhabdus luminescens
SDKEIPMQIKSNGLVKWVVPAFVIAGLVVGIKSCRQSETPVSQTVSHQALAELSSGELRALGIEGDTPEDTLRTLIGALRSIRVQQAALEKQNAQLLADNEKWRNGSQSMTDQINRVVAGTREETEKQQQLLKAEQQTLFSRLDQLTRQLGNKGMNINNSLVERDIPLGLGLDNTGQNTTSGGDRLVWITPQDTLPVDSQVAMSGQPASPRFPVSFLEDNALSRQKVEYDGITKNQRAITEDHTNEIIRPVYTLPENTTLVGSQAMTALLGRVPVNDKVTDPYPFKVLIGKDNLTANGIELPDVEGAIVSGMATGDWTLSCVRGNVTSLTFVFADGTVRTVPKSDNRTNGSHHVQDNSSGGIGWLSDNNGIPCISGERKSNASSYLPTLFALSGGTAAGDVLSQSQLTTQTNGYGGATSSLTGDAGKAVLGQAAAGGFKAVSEWVKARYGQTFDAVYVPPGARVAVHITQQIPIDYEERGRRVKYNLGLGQEVRDGLDZ

SEQ ID NO: 3244 - protein, 329 aa, Photorhabdus luminescens
QHTATAGSSIAAGTGEKGDIPVNKQVLVELLALTALLFAGLVMVSPVEAVELMKWERIPLPVALHVGQERVVFVDKNVRVGFPGALDGKLRIQSTGGAVYLYPSETFTQTRLQLQDVESGEVILLDVTATNGKDPLEPVRVVYHGDVITLTDDHQIHHGAKGDNTSATSPSLAGERQAARRQKPSYTAPLPVVLTRYAAQSLYAPLRTVEAVPGIHPVSLALSPRLTTLYPSAPVIVSPLGGWGVDNLTVVALKVRNTHRENVVLDPRRLQGQFIAATFQHRWLGPSGTPEDTTTVYLVVKGRPDRAFLPEPVRSKTPMKRQGNPHANZ

SEQ ID NO: 3245 - protein, 357 aa, Photorhabdus luminescens
MTSELQIYTSLLTDVKERIRGGQFRAAQSVNAELIQMYWDIGHMLHERQEQQGWGAGIIPKLARDIVNELPEVKGFSERNLKRMLRFYREYALPRMEQQGSGKPVSTIVPQPVAQLPWGHNILLIERIKDQTERFWYAEQTQIQGWSRDSLLHMIKSNAYARQGSVVSNFKNRLPVSQSELVQQTLKDPYVFDFLTLSEPFKERELETELLKHLEKFLLELGEGFAFVGRQYRITVSEQDYYLDLLFYHLTLRAFVVIELKRGEFKPEHAGKMNFYCSVVDEKLRHSTDQPTIGLILCQTKDRILAEYALRGIQKPIGVSDYELTRTLPEDLKSSLPSIEELEAELSHNDENTPSKZ

SEQ ID NO: 3246 - protein, 655 aa, Photorhabdus luminescens
FGCSNTGTDANSARRSTGTSHGFIVGNPICPSMETGNMATMKPFQKLCRSLLLSLSISGVMLPSAYSQDLDWFPAPYSYLAKGESLRDVLVNFGANYEASVVVSDKVTDQVNGHFEQDTPQEFLQHLSSLYNLVWYYDGSVLYVFKNSEIQSRLLKLERTNATELQQALKRSGIWEPRFGWRPDPSNQLVYVSGPPRYLELVDQTTSALEQQSLLRSEKTGALTVEIFPLKYASVVDRKIQYRDTSIEAPGIATILSRLLSDTNVTAVTGEASSPSMGESYSSRAVVQAEPSLNAIIVRDNPERMSMYAHLINALDKPSARIEVALSIVDIDANNLSELGVDWQVGINTGPRHIIDITTSAREKTEIKEKGESIGSAALGSLVDRRGLDYLLAKITLLESKGSAQVISRPTLLTQENTQAVIDNNETYYVKVNGERVAELKSLTYGTMLRMIPRVIQVGDSSEISLDLHIEDGNQKPNSSGQDGIPTISRTVVDTVARVGHGQSLLIGGIYRDEMSQITRKVPFLGDIPYLGVLFRNTSEQVRRSVRLFIIEPRLIDSGIAHYLALGNGQDLRPGLLATQDISNQSLSLGKVLGSAQCQPLSSARQIQETLRQAGKSSFLDSCRMGNTYGWRVIEQQCSLKETWCVRVQNKANRZ

SEQ ID NO: 3247 - protein, 258 aa, Photorhabdus luminescens
RLMGKLTMTQQNTKSQQMPAKKSGPLKTVLWDMPWMLIGFLLVSLFFSLVIEYLGIAFFWPEQGERHSQQVMITESGWLSKEFTRSLLLSEPATTLSIGLKWSYQWVFVDSGALDWINQQHTVQARSHYEMVRELSDWSVLLAESLRKYLLATVYVTVTFIIRLTILVLSLPLFVMVIGVAVVEGLNRRDLRRYGAAYESSFVYHHAKRFVKPAFCVPCLLYLSWPSAVYPNLLLLPAAILLGVAITVMMSTFKKYLZ

SEQ ID NO: 3248 - protein, 461 aa, Photorhabdus luminescens; identical to SEQ ID NO: 1083

SEQ ID NO: 3249 - protein, 653 aa, Photorhabdus luminescens
MSDRYVIEARLRPAVELNTAVVSAVAAGVCIVAPWAVALSPSVSDVMAAGFGMLSGLRFRQGLHILNYRRNIRRLPRYVMASHQVPVSHQRLFLGKGFLWQQKHTQRFLDTLRPEVERYVQPSRYYQLARAFEQRFEYPLPSLCRLTQRDSPWNPVRPLPPVGGNPALHGIEPDEVNVSMDLRERVGHMLVLGTTRVGKTRLAELLITQDIRRGNITIVFDPKGDADLLKRMWAEAHRVGREDEFHVFHLGWPDISARYNAVGRFGRVSEVASRIAGQLSGAGNSAAFREFAWRFVNIVTRALVALGQRPDYTLILRYVTNIGELYETYAEKIIRQCLPVLWEQVEKSLGLLTEDDLPRNMQGQTNAVKIWAIEMALSSEAGKKLYDPILDGLRSAVRYDRTYFDKIVASLLPLLEKLTTGKIAALLAPDYTDMNDPRPIFDWQQVIRKKGIVYVGLDALSDAEVASAVGNSMFADLVSVAGHIYKFGLDDGLPEGKTRKLPISLHCDEFNELMGDEFIPLINKGGGAGIEVTAYTQTLSDIEARIGSSAKAAQVTGNFNTLVMLRVRENNTAELLTRQLPEVEVYTKTLVSGITDISSPEQGGHFTSNTQDRVSTIRTPLITPAEVINLPKGQAFALLEGCLLIRSPNQLIZ

SEQ ID NO: 3250 - protein, 209 aa, Photorhabdus luminescens
RMACGGILSLAVAGSLFWVTEGMAAAVKQVVPPGYQQIARVHGVPVEMLYALALAESAKRLPQEKHERPWPWTLNVAGKSYRYATRQAVWQALQGFMRSVPLKRIDVGITQVNLGWNGHYFRSYWDALDPYTNLHVAARILKTCYQSNPGSWLNAAGCYHHPAGGQPASKYRKIVARKLSTLETRYPVLSTNIAVVNTTQTWIEPKEKZ

SEQ ID NO: 3251 - protein, 275 aa, Photorhabdus luminescens
VDVGQYLRSSGCVPGTRAPSNPVSQWRVMMRKDFFSQRKGVVLIGVVMSLSASAAQVAISEQTETGMKATQQQVTQAENHRIQAQMWGLTEAEFQRYQQLMQGQRGIQSPGLDPLSALGIEAETVQARQRYAELWVRQEYVRTEKELAFQRAVDAAWKRLAPNILPVNLGKGDGIAQGNQGRLVLFVKEDCAACDARLAAVLSADREVDIYLVDSEGNDDVLRTWAGKHHIPSEKVRSRKITLNHDKGRWRQFGQGKMPVVLQHENDGWRVVAFZ

SEQ ID NO: 3252 - protein, 274 aa, Photorhabdus luminescens
NKQGYCGMTTEIPSLSPSLTSEAEIDSLRQAVSQKTQPRLLSLKKCLRYLSILLVIVSIVLLAFVVRQQHHQLVEFQSLMRNGSFQHLPDEVQKLHERLDKADTGFVSRQDWQMQNDRFHQALIAQQGAINDQQKQLAQSVTDLSRAHQDLTEAVSVLKNIGKQQEIRVDALIAWKSQQEKHAGKKAGTPDREVLRTKKRIVAPFILSGIERRGEQVYAVIIPRDTDPRSQISQMRLLTPGESAFEWTLVSISDHQAVFQAQGHRQTLSVNGGZ

SEQ ID NO: 3253 - protein, 502 aa, Photorhabdus luminescens; identical to SEQ ID NO: 71

SEQ ID NO: 3254 - protein, 393 aa, Photorhabdus luminescens
MLGTAAGLMILLVLSALGTRIYNDYLTEKSWQVMAAQSSRFSAASKAYIGRYYDRLRNSATTTQPVMITPDMLRKTGLLPSGFKDTNSSGQRYQTAVVRNTQDPALLQAMVVTQEGSPLPYKALRLISMDISTGLGGYIRDGKTATGAMSTWTVPLKDFGINSGEGHLAVLLSADELSTAREERDRLYRFAVPGRPELNKMHTDINMGGNNLNNTATVNAQAGHFSGDIRANAGQFQGDIRSHDGWVVTTKNKGWLNETYGGGWVMSDSNWLRSVNNKSVYTEGQIKSGTLRADGRLSIGEFLQLDKVAVAGTACLPNGLVSRDSKGAILSCQSGLWTKGEATLQQNQCYRDGNWGGRDFAEHRCKPGYYAAGLKFVGHQRSESAYVITCCKZ

SEQ ID NO: 3255 - protein, 222 aa, Photorhabdus luminescens
MKTLIAVSFPTEYTPLVMMTLFVIGCVLLSPVSKFLQEYGLLMCSVHPVPRIAICLYVMSGTLMLLSPAPLMERIAALLLLSFLLQLSVMDVLSGWLPRQFTLACLVSGVLVNISLPSVSITLLATVLMLAGMGVLRELMNRHSQCEVLGMGDVWLMGALSAWLTGLPALIGCLMGLSGFVLWHLAQLPHQGTKGGPLGPWLSLGSVVMLLERLYQPIWVIZ

SEQ ID NO: 3256 - protein, 210 aa, Photorhabdus luminescens
RTLYIRNKSMQYMMIQKQDRMARPPERGWAILENGAVALVVIAVITVVLGGIYMLYDRKDAVVETTNLQTIISSTQGLMKGSGGYEFSHADKMTGVLIQLGGVPKSMTVRGDTTVGNATLWNTWGGQVKVGPSSTGGFNNGFTVTYERVPQSACVSLATGMSRGGSASEITINNTHHADGKVTLESASTACTRNNGRTGTNKLIFTINGZ

SEQ ID NO: 3257 - protein, 423 aa, Photorhabdus luminescens
MSWKIRFYRGLNKSIEVNLAEGRLAIGSDPLQADIVLVDEDVAPVHLILEVEPDSIRLLEWAGEAAPSQNGEPLSPGATLQALARQEVGPLLWAFCDQQHTFPSQLAEPVVTPQRPARQNRSRVAGGMLILCLVLALGLLALLGHEGWQRNHMSNGIAEQELRRFLSSDSAYRQVSVQMMPNHGPPLLKGYVALNHQRLALQQYLDTHSLSYRLELRTMEELRQGVDFILQKLGYAQIQSSDGKQPGWIRLIGEVTDTSQQWNNIESLLKRDVPGLLGIENQTRFTGNHLKRLDMLLAKHDLPDTLTYKDKNDRIEFIGQLDEHQTHNFYRLQQVFKQEFGNQPALVLLNNKQLTRNDELNFDVRAVSLGRVPYVVLKNNLRYPVGATTENGLIIEAIRQDAIVITKGKQQFIVKLNRSPASZ

SEQ ID NO: 3258 - protein, 362 aa, Photorhabdus luminescens
MREMSWGRRLRYVLVRHTFLPSYRIIFYEALRFLLENKIPLLKALRQIRDVYTHFDTHWHPFAELIDDCISALTDNSQTNTLEHVLAVWGPVEEAALISAGMRSGHLPEALSQAMTLIGCRQRILMVSLRMMIYPLLLVLLMAGLLVITATELVPTLRNIADPENWQGVLAWLNGMATFFEHAFLWCGVLLISFIVGVAYSLPRWVNRLRRIADHFIPWSVYSDIQGAIFLLNMASLLRAQVQTLDALIILQRFASPWLQIRLESIADCVREGDHFGRALHHCGYDFPSKEAVNFLSLLTEGDGTSEMIGRYGERWLDQTIVRVNRRANLVMLCSLLLVVGAFMLILLAVMEIQSMANILPZ

SEQ ID NO: 3259 - protein, 518 aa, Photorhabdus luminescens
MKENIQVNDAVLLLCEEQQATVLIDNNRRGDPQVQTRVMQLLEATPEAEIRFVNLSELQANRQKQNQRTNEQGVCLSDLTDVSERQKQVLTCFELAKKLNASDIHLTISPGLTRIEMRIHGELEVVNELSEEEGMALASTIILSMCDVTETQFFPGRQQDGRIKADFLRRVHLYGARYSHTPTADGLYVVMRVIADDGDKVPTLTQLGFLPQQIKRVSRILRLPEGLIVLSGPTGSGKSTTLRTFCRQYLDRTGGKKRLLTVEDPPEGRIAGAIQTPIVCDKSDEEAVRLAWHRALTSALRLDPDAVMPGEMRDLTSMLTAIYAAQTGHSVMTTLHTNSAVGIPERMITMGVNAGLIADAQLLIALISQRLVQTLCPHCRVPWAQKQAVLDEEQRAYLMRYCHAPGTCCVENLYFRHPEGCEHCCQTITLSGRIVSRGVTGRSVVAEVIRPDARFFTLLMTEGKEAARQHWVSNLGGITRRQHLLHKLNAGLIDPLEADLVCPLDEDDYLLMEPCDAZ

SEQ ID NO: 3260 - protein, 439 aa, Photorhabdus luminescens
MKSIDLEISGEIPEVTVVKADRHCWIGGLRWSPYVKVKRGPRRRQRVRPVASRSQYIDVHLVVGNRSGRRQQTARMMGTGIIRKLYCRHTPYSLAIAFLSHSGPNGYGIYDLGEGQWLFLATQKGLPSVMADIVGTRENVNAALSRFLTFNPAPDKSWRVVSDPDNPAHWRSIISALSAHQYRMCRLQRRWRSPLLLMAVFISLLIVVWVLLQSGKSPDERLPMTETVQVRAARLFEETPKPVDLPHPWADKPLLPAFLARCVMTSRTIPVLLAGWRLTAGSCRKDGVRLHYEIMPGGTAAHFVQRVQSVFKQSPVFDLVQGAKEGRVFLPWKPLPVRNETVPAVSVQLMKMVSNFQQWQIPLTLNELTPASALPGDGQSIPSQDWREYLFSFSSRVMPAWLFAELDDTGLRMNSLTFTLTSQGQLTYQTEGYIYARKZ

SEQ ID NO: 3261 - protein, 574 aa, Photorhabdus luminescens
KNGQDVMKNKWCSLRLCTCLAPLAAVTGMALMSGCTLPAVDNMAREASVQSRVAQQHLHQQHSLKQPGVTWVDKPWVNLKPVVQPVASVKLPSCQITIINSKVGLTLPELGQRITQLCGIRVTVAPDVLSRVSTTAGGLTRQMNRALPTADDKGRMPLDWLDDRDIHSINADERREPEVLTGLNWQGELTGLLDNIASRLGIAWKRDNRAVVFYRFETRTFQLNVLNTRTSSNASVASGSTSSMGTSGGSGNVNNSVSGEASSSQKTTVDLNSDLYEDIRKTVENMLTPERGRFWLSSSSGTLMVTDTPAVLDSVSRYVEEQNTVLNRQVLLNVQVLSVSTSRKEQMGLDWGLVYNSLHNLGATLSGSFSGMGSGTTSAGVSILESATGKAAKLSGSSLLIKALSEQGNVSVVTSQGSATTNLTPIPIQMADQTVYVAQSSTTTATDVGATTALTPGMITTGFNMTLLPLIQRNGDVQLQVAFNLSDPPTIRSFTSKEGNSYIEMPYTRLRSLSQKVNLRAGQALVLTGFEQADTRVTKTGTFTPGNFLLGGGQSGENQRSTLVILITPVLLDZ

SEQ ID NO: 3262 - protein, 350 aa, Photorhabdus luminescens
MKNPVFFSLSWVLVMVLAGCAGQTQEATASGVSFHRSHQASPAVSDIYSLTPEVTRYDRYTLVSVGSQAVQREPLNQIINITMPVPLVQRIGDGLHYLLFGTGYSLCDTTATHFVKLIGRPLPAIQRKMGPIRLSEALQIVVGPAWRIRVDEVNREVCFVLRDEYRQFSETTVGRITQPKMRVPLQIASSPALSASTLSNSTLATPLPVKPLIAERPKTDTLQSSVTGGKSTTISSVSPTQPIKSLLSGSTPVATVPIGNIWRAETGTTLRGTLERWANTTDCPVGGHWVVVWSSPTDYRIDAPLMFKGNFESLLVQVFDLYRQAEKPLFAEVSRLQCLISVSDKPVTRZ

SEQ ID NO: 3263 - protein, 311 aa, Photorhabdus luminescens
VLRTYTLTGIILNMKKTTSLRDALRLIILNYHPKPIIALHELNMYIYMLYRDRMFDGIRIGKIQATEPDKRIMDDALEDMVNQGILSPIIPSFIWQISNKNQASAQQIACCLTPYSHLAYLSAMEWHGITDRIPHIVHLIQAPLNTARSLYQEHLLKDFPAISNMQPLMIRGFTPYEKIDGKELIFHTHRNYRKKQELHDSGGIRVSNIGETFLDMLREPDLCGGFSHVQDVFREYAGEYLPVIVKTVDKNGKGIDKARVGYLLEEVCGLTHRTIETWKKTVQRGGSRKLIASNPYKKTYSEVWCISINNZ

SEQ ID NO: 3264 - protein, 299 aa, Photorhabdus luminescens
ILYMEYSIEDWIADAPQDRITFRQAVHIVLQAIASNEYLKPKMIMKGGILLGLRYQSSRFTEDIDFSTNMRLADIDQQTFHEELDDALAISSAELPYQVTCAVQSLSIQPRNTEEATFPSFRLKIGYARNNNDGEMRRLRQGQSPHTVKIDYSLNEHSLNVDHITLTDDNDIQAYSFTDLVAEKIRSVIQQIVRNRSRRQDIYDLNLLLDSIQPENKDKLAILTTLLEKSTGRLEDGMVNPETLGRVDIRERSSREYELLKDEVEGELMDFDTAYTRIVDFYKSLPWDLVTGWQNVAKZ

SEQ ID NO: 3265 - protein, 227 aa, Photorhabdus luminescens
QVGRMLQNSLYLCHQGQRDEQLDRFFFINTGVCSVSVMADGFSHCHASPHYVDWLGEQLYALENTGSCCNELCGEVLRILSCNDCYPGKASIAVIVSDQEKYRYATLGDTRIYWPSHSFRTTDHSLAQRCIDRGNCPAEKLRDHPLRNQLTQFAGADSKHTLTWSERERTYHDAIIMCTDGFWSHFDDRFIHEIQTEASLHNAFSGMINKKTVPEDNVSVVLLRDLZ

SEQ ID NO: 3266 - protein, 208 aa, Photorhabdus luminescens
QVTRKRQSQTFLTLRAVTQRHSSQTAGILAIVRRQQVIPRIFESGGQTVNEENDFWEAVKNSAAQRTARNLHWHMVQGWKLSSLNKLQGHSTIPARLFTNPSKEAVYRTDNRENLCTTCLSNRSRGVQCTKASLPSQISSLGTQQKISSPCHCRFFRYVLMPGRSGFSFSIDGADYPTAFRVFYTSPENTVFSLALTRYASTHRTRQZ

SEQ ID NO: 3267 - protein, 677 aa, Photorhabdus luminescens
MKLFLCEKPSQGRDIAVVLGATKRGQGYLTGPGVTVTWAVGHLLETASPEVYGEQYGAPWRASVLPILPASWQMVVKKETADQFTVICRLLKQADEVVIATDADREGEVIARELLDYCQFQGKISRLWLSALDEVSIRAALANILPGEQTASLYLAGLGRARADWLIGMNFTRLYTVKARECGYSDILSIGRVQTPSLALVVFRDREIIAFTAKPYWQVVADLQFDGRIFRADWVPAATYCDEEKRCIHQNVAQTVVKLCQQTGTATVLEINTKREKHAAPLAFDLGSLQQLCSKKWSMGAQQVLNIAQNLYETHKATTYPRTDCGYLPTAMQAEIPQVLDAVVKSDPAMRIVVDSLDRTLISRIWNDKKITAHHGIIPTKQPCDMNKMTDDERKVYQLIRQHYLLQFLPLHEMDITEATFDIGGQLFRTRGNVVIVPGWKVLFSAGKDESASIGKDDSLGESLPSMVKGNQCQVNEATLRMLQTQPSAHFTEGTLIAAMKNAAAFVSDPQLKKVLKDNAGLGTEATRAGVLDTLFKRGYLTKKGKYIHATQIASELIAALPTALTNPGLTALWEQALDDIAQGQAELPDFMARQVQWTQYLVEQVQAQKVVITPPPSLPCPVCGGVTRQRQGKNGVFWGCIKYPECSGVVSTVDGKRKTRSARHKNIPKKPAMTGZ

SEQ ID NO: 3268 - protein, 212 aa, Photorhabdus luminescens
REWLAVTIHNCSPSSTACGNNWLMNRIEGLSYNTVSQPTVQPSVSSKHQHSFEQALETTPDQQMLKERQQRWLQGEPLENVLGDLDPATQRKVIWQWYQALSSDKQPSQRAQLQAKLIAPVQERLWSQFGGLAGNIKPPLDMPELRKIVREFAPTGRQQETVLLEVLGEIKPIPGNEYLSDLIRQELKTLIPRNGMVDNLIRNSHKPDLEEZ

SEQ ID NO: 3269 - protein, 248 aa, Photorhabdus luminescens
RNYLSDILMSQRECTMTETKETHAVRSGALHSSLTIELHTHYAISLWNGRRDESSKKNKPVIISMPRFFSLAGRISQDSLIDNPYADMAMLALETKLASAHDQMQAALAELAATLSGVPAQIHLSEIASVAPLNIGVYSRTPLGYRCVWLLVGYDQLVMKALQAHHYALISRQQCDGFLKKGGHWVRQIYGAVQPYRSFAVTRDDILSQTPAGREAITRLGLPDEAVMRGEKRSVFSPELKSTVKQKZ

SEQ ID NO: 3270 - protein, 429 aa, Photorhabdus luminescens
HMSGTTMKSGNNTRKAPLSSDSLIAFTLEQMNARLAAQAEGDEKKQLRSGLLYLGNVHDAIPRQLILDTRLSPLDKMAWIMIRLYAQQNAGAVFPTYDELQLQLASPHSGKASRETVSRVLLMLRITGWLSLCKRVRDEKGRVKGNIYAQHDEPLTFHDAEALDPNWLDTVGEACRHKNRVISQTAWSVLMEVKDDPMMRHRRSRIALLENRLGQVQTPQQMAALQAISQPSSVTELNPKGQNRLSSETEFNTKTGDSNPSSATELSLKSTSYDRVRQSNGYVRHFTHSVNKNTYVAPSDGDNPIVEHLLPVALRNQLSDDDIRMLTEQLQALPSDQRHLVLDSLRVPLENGSLKNPVGYLLTLMKRARQGELRSPGTANQGENPGMKKPVPASRQKDRPVLPEVQRKANPAVMKKVIAEIRQNLMKRZ

SEQ ID NO: 3271 - protein, 581 aa, Photorhabdus luminescens
KGKYMSKHKTSLSDAILQRGKTPQSPISTVVLPMAEMPMVLTLDELQPNPDNPRLSRNPRFDDIKASVRARGLDSVPKVTRDPEDSGNVYIFSDGGNTRYQILCELWKETGEERFFRIPCLFKPWPGRLQCVIGHLAENDVRGDLTFIEKALGVFNASSMHEKCLGRPISQRELTDLLKQEGFPISQTSISQMHNTVQYLYPHMPNLLISGMGRPQAVNILSLRVDAQKTWNSFSSEASCGKDFDSVFGEVCQRFDNPELYSFDMLRDELIGELIKALPHPALNYDRWLLELDPKERNRRQLFGEPPPIAEHLRDADRQAAEVPEKSVPLVTKSAACVSAVEPESHGDVIECQEDKKTEEYEVCPPKVEVQPDVYETRPTLSSELSTIQDKEDIAPLVSAPLSQIVPSTLSEFNHCLPTPPQTSLLTEPTPSDGLSFAQTGLEPVSDIWSISPVRDDIEHLQDMAFRLAFELAEEMGGADELEEAKDTACEMGYRLAYSHTASRFVQVLLSLTGESDHNGELADTGIGMLGTWFVGSDKDTPVLPDVAVVKFMRLIRVLRRLRELQRELSVVSAEGNGNVZ

SEQ ID NO: 3272 - protein, 461 aa, Photorhabdus luminescens
RMRNPFSLPDGIEQPYSCDAEQAVLGGLMLDNDRWDEIVPLIHADDFFLPAHRRIYGAVATMFAANLPVDVLTLSEILEQKEQLKQVGGFAYLAELGKNTPSTANIVAYAEIVQAKSRLRQLIMLGNEMSDQAGHPRADFTDITEMAEQRLYTLSEQKAVRQDISLKEGLGLLIEKLEQANGGNGITGTPTGFRELDTKTCGLQPGDLILLAGRPSMGKTALALAFCLSALESAPDAVAQIFSLEMPMDQLLMRMVSMLERIPLERLRSGLMDDEDWARVSRAMETLIQWENRLIIDDNSYQTPALLRARARRNVRKYGRPSLIMVDYLQLIRSPEQENRTQEIAEISRSLKALGKELGCPVLALSQLNRQLEQRTDKRPNNGDLRESGALEQDADLILFVYRDEVYDANTSDIGIAEIIIGKHRQGSIGTVKIQFDGACTRFSDLTERYYDLGAKRGNIZ

SEQ ID NO: 3273 - protein, 295 aa, Photorhabdus luminescens
MKILPVISPKGGEGKSTHAANVAGFLADAGFTTLLLDADYSQPTSSSIFALEYEAPAGLYELLMQTADLGQKDQIISRSVINNLDVIISNDPDELLPTAMLHAPDGRLRLRNILQHPLFSQYDAIIIDSKGATGVMAELVVLTATEFVLGVIKPILPDVREFLRGSLRMLTRLQSFENYGIRLPLIQILANGIEGTNLDRDTLNELAHIIEHKRYDTSSFGGRRVYQLLKTRIDLLDIYKLGHVRAQPVHRLEYKTSRKSPAAAQTMHCLSCELFPEWHEQFDALMANKGVKNAZ

SEQ ID NO: 3274 - protein, 339 aa, Photorhabdus luminescens
SEEVEMDSMTWDNLLDEYFFARILRPDTESSYRKVVNTFKVFAGVSNRPAQVTRQQVLAWRRYVLHQSGLKGVTWNSKIAHMRSVFNLAIEEKILPQTENPFIGVEVNENKNKKKTLTKKQLTTLYLTMGQFEERERRTGDNHRARCALYPTWYWLTVLDTLRYTGMRQNQLLHIRLGDIDLDVRRIILCSEGSKNHYEHQVPVVKWLYPRLEILLERAQAAGAKPSDPLFCVNYFTAKTDRGSETDQLQTIKSFFRRLSKECGFDVGPHRFRHTLATELMKAPDRNLQMVRGLLGHRSIATTMEYIDINLDIAGRALERELMLYIDVEPERGEMLIGZ

SEQ ID NO: 3275 - protein, 542 aa, Photorhabdus luminescens
IIACGFHRLIFIPGKEFCFVPARGCIRVLGKKRRLIVLKKIKILLAGTAAGKKSLPQPTAIPKTVKAGYFLPSESRLLLDISRRRQCLQCLWDNSALPKTHYQALWLAPLHECVALMQQLPAAPQGPYAHPGGLIDVTLQCTASAVRLAKGQMLPPGVAPETQAEQSVIWNTVVFYAALFHFLPVLAQFDGELDEGQPWYPGWVVPQGPYRFRFKTPPVETRVACHFGGVLAGRLLPAKALTWLASVPHALPALFCILSGDMKEDDAINQIIIEALNKAGAPTISEIFSVTAASPQMIVSGNPDVSATPLSTAMDSVLPSQRRQEDNPMTEIVSSAVRPVDEISSAVMTVAPEKGGQSDGSTQQLLSLMGMNVAGTVTEQIMASEAEIVPPYTSMPSQHAVQATWQNENAIETPCIGEQFWDWLSAGLRHGVMTINTPEARIHLVSGFVFVSALAIFFQFLSEKKQVDGKEVSEKWKRVQTAFERLGRHRVSGGKYFCCCHLYDSADRTGSYQRIHGYLIKNTLLYRDRSVPEDSPFLMISZ

SEQ ID NO: 3276 - protein, 308 aa, Photorhabdus luminescens
MSKWYANRLHITGQPDQLDALRQWGLGDKIPYYGQAIHQSIKLFVAGCAGLLQPTETIDYPLYPALVAGGVGEMSPENWAFEQWLALLKENVALDEVTSQQIDRLYQQSGLAERKWETLLPTAQKTIMALFNQKSCDWFGLVDWNGERDTEMLWSHLDDRLTETVPCDLFLLIPTRLASEINGFYGGLLKDHETTHELYFRLYGMTRPRGYDIAWKHHDDGSLTGHFDKTLREPWYEKIIVPLSRQYHCRITHYFKEVCGCCGYDKYLNGQWEAGIIDELEFGEEDEDGTRKVVGPDYILGNISHDGZ

SEQ ID NO: 3277 - protein, 339 aa, Photorhabdus luminescens
KVNGFLKKDIQILEKPFAQSRIIYRGNPVNHEISLMSLLRFYIRHQFAERMGLALDDDAIFYLFHESQGDYVNTHIKFTKELLLPIMTHLLDSLSEDPANRARCRNSERILTLWIRGMEAISHVYQDPMLMPYTHPESSGRVDTLIRPDTAVLLNLTAEQFLRLTAQDSLPEDEQIGLEQFSKTQQYWTRFMDYLDKQLTETCRYCFERLGQFLRYLQVEPRLIRRFSFAIGYIDVLMGPQDLHNIEAEEFESGYLEDYIDAVSDGLMTPVQFRVDVVYKNDRVIASFRSDVDIEDVNNPTVRDYRDVVDEAITWVDEQFVRKTHRESTITPIRKLAAZ

SEQ ID NO: 3278 - protein, 276 aa, Photorhabdus luminescens
VAFLCQLFGVYRSSYQAWHHRVKKPDTERIRLKSLVREAFNEGKGSAGARTIAAMVTAKGIPLGRWRAGKLMAELGLVSRQQPKHRYSHQEQEHLDIPNDLDRQFTVTEPNQVWCGDVTYIWTGKCWAYLAVVLDLFARKPIGWAMSFSADSELTKRALEMAFESRRKPQGVMFHRDQGSHYTRKAFRRLLWRYGIKQSLSRRGNCWDNSPMERFFRSLKSEWVPEEGYSDFRKAFRSITNYIQGEPRQSRDFPYVFITFLYPASIRRANGAGAGZ

SEQ ID NO: 3279 - protein, 246 aa, Photorhabdus luminescens
VKKHYIICVMLAVLMLTGCKIELYTDVSQKEGNEMLALLREAGISSDKQPDKDGNIKLLVEESDVAQAVEVLKRKGYPRENFSSLQDVFPKDGLISSPIEERARLNFAKAQEIARTLSEIDGVLVARVHVVLPEEQDRLGKKLSPASSSVFIKHAADVQLDTYIPQIKQLVNNSIEGLSYDRISVVLVPAAGVRQVPLAPRYSTLFSIQVTEESQGRLIGLLVLLLALLFISNLAQFLWHRSRIQZ

SEQ ID NO: 3280 - protein, 309 aa, Photorhabdus luminescens
AENLQNNLHALHGRLHRGQYRPQPARQVMILKEDGTERPLSILCLEDKIVQQAAVTVLNQIYETDFLGFSYGFRPGRGQHDALDALNVAVMERKVNWVLDLDISRFFDTVEHDWLIRFIQHRIRDGRMVRLIRQWVTVGIVDEHGHRQKSHCGTPQGAVISPLLANIYLHYSFDLWLNAWRKRVQGEVVMIRYADDAVLGFQKHQDARACQSLLQRRLMQFGLKVHPAKTRLVRFGRFALKQYEERPERGKPGTFDFLGFTHYIGRLHTGKDAVMRKTQRKRRQIQLKRIKQGLRQRLQTARKKRAGGZ

SEQ ID NO: 3281 - protein, 195 aa, Photorhabdus luminescens
LKRVVEGHINYYGVPFNSRALCQFVEEVKLMWLKSLRRRSQRHKMTWARYSQRVKMDTVPPNCASLSFAALLRQTPEVGAECVSSARPDLCGGVAGNGYSYRDHNHSQNTQAHTPKETFTGPHARFTLYVKKWSSDYLNSSLMACRTINLAAQLVKLMIPSFSKPKVSFRIVIASVPYKTEINIIILCIVSSLSZ

SEQ ID NO: 3282 - protein, 207 aa, Photorhabdus luminescens
MILFDEENLSPVRRRTLERITHSALKLYREKKFPSPEEIANEAEYAKVTLRSYFSTHSDFVEYVVKQVIGSFVIPPMGDDAEENIEKLLRWGYEEIEANEALMRDALRISQLRWQESLSGEDNHKRPVLKKKSNRKETLSTALAPLKGQLKDDTIHKIIMLISVLYGTEAMTILKDTFGLENDGIINLTSWAAKLIVRQAINEELRZ

SEQ ID NO: 3283 - protein, 275 aa, Photorhabdus luminescens
KISLMIKNNLHVVKYYNRFTFVFELGIPHRVNTMTRFVVVVGTADTKLDERVWLKCCLHLAGVDSIIIDVSTSIPGKNHQNKKIDIHSLQVAEYHPAGADTVFCGVQNKAITAMSVALTNFLNSSIDDIAGMIGIGGSGGTALIMPAMQSLPIGLPKIMVSTMASGNVSAYVRASDIAMLYTVTDLNGLNRISRSVLSNAANMIAGSVNYFTPLADIHKPALGLTMFGMTTPCINQINIKDYLAVVWIIACELSLIVEPKLIRNKVWKQAERTFZ

SEQ ID NO: 3284 - protein, 207 aa, Photorhabdus luminescens
MILFDEENLSPVRRRTLERITHSALKLYREKKFPSPEEIANEAEYAKATLRSYFSTHSDFVEYVVKQVIGSFVIPPMGDDAEENIEKLLRWGYEEIEANEALMRDALRISQLRWQESLSGEDNHKRPVLKKKSNRKETLSTALAPLKGQLKDDTIHKIIMLISVLYGTEAMTILKDTFGLENDDIINLTSWAAKLIIRQAINEELKZ

SEQ ID NO: 3285 - protein, 415 aa, Photorhabdus luminescens
MTRFVVVVGTADTKLDELVWLKCCLHLAGVNSIIIDVSTSIPEKNHQNKKIDIHSLQVAEYHPAGADPVFCGVRNKAITAMSVALTNFLNSSIDDIAGVIGIGGSGGTALITPAMQSLPIGLPKIMVSTMASGNVSAYVRDSDIAMLYTVTDLNGLNRISRSVLSNAANMMAGSVNYFTPLADIHKPALGLTMFGMTTPCINQLTTELNTQYDCLAFHATGNGGTSMEKLAKDGELVCVLDITLTEIADLLFGGVLGCPDTRLDVIAKKNIPWIGSAGALDMVNFGAKDTVPERYSNRLFIEHNSQVTLMRTTPEENYQLGIWIGNKLNKCDGPIRFIIPEGGFSALDCPEQPFYLPASTQAFCHGLKKTIKQTELRKVIKTPFHINSPQFCALVIQQFKEIIGLQGIPHEEKIZ

SEQ ID NO: 3286 - protein, 283 aa, Photorhabdus luminescens
DSREFLMKKKYNQIIETLKQKVERNETIIGASAGSGLSARCEEAGGADLIIVYNSGRFRMAGRGSLAGLMPYGNANEIVREMGNEILPIVKETPVLAGVCGTDPFCNLSLFLDELKAQGFAGIQNFPTVGLIDGKFRKNLEETGMGYALEVKLIRLAHEKGMMTTPYVFNEKEAEAMAQAGADIIVVHLGLTTGGDISANTSYDLKSCIPIINACASAAKTIRNDIITLCHGGPISEPEDVAYILAHCPNCHGFYGASSMERLPTEQAIKHTIQKFKEINRSZ

SEQ ID NO: 3287 - protein, 451 aa, Photorhabdus luminescens
LVNKMNSTIKLSVQDTIRFAKISSLHIKILFLCLSILILDGFDTALIGYIAPAIVDSWGISKTDLGIAMSSALVGLSVGAVTSGPISDKLGRKPVIVISVFMFGICSIATIFSTTVYQLSFWRLLTGIGIGAAMSNALTLISEYAPENRKSLMVNSVFCGFPFGAAMGGILGSFMIPKFGWESMLVIGGIIPILLVVPLIFILPESVLFLINKNKSEDKIKRICKKIVGENYNKIDFSRLKFIEKQKIKPINEILSHGHLSSTLLLWNAYFMGLLIFYVVTNWMPILIKDSGFELSYATILTALFPLGGGIGTIISGIIMDKLSPHKIVSFNYLITGILLFSIGYVDNIISLGILILLAGTTMNSAQASMGTIATLHYPTTSRATGVSWMLGIGRAGGILGAMFGAWLVQLGLGYRGVLMTLFIPSAIASISLLSLLMVLNNKKIKTFSSZ

SEQ ID NO: 3288 - protein, 316 aa, Photorhabdus luminescens
MSDKIEYTIRKLTPYFCAEIRDIKLNQPLNKDIIKTIESDLEEHEVLVFPDQDITSEDLMRIGRYFGQLTVHPFAENSEKNPELIVFDYKSGNPPVLTDRWHSDETYKLCPPMATMLYSRIVPEIGGDTCFSSMTTAYDFLSIKTQDFIRGLEAIHDFSSYKYLFPDTEEGKKLLQKKELEYPPIAHPVVRIHPKTRKKTLFVNPNYTRYIKNMDQRDSDALLAQLFNTTSVLEYQYRHHWKPNMLVMWDNRSVQHAAVHDYYPNRRYMERVTIGGDQPISESEPASPEQLRKFKVPAYNHDDSRRAKRQFEIESZ

SEQ ID NO: 3289 - protein, 413 aa, Photorhabdus luminescens
IYLINRDKTMNAPYTEIYNFWSIKSFIRLFLLWLAGAGTRLTILATPPIISDIHHDLNLTETQVGIISGLPAVLFAGTAILGSLLIARTSAIKTLILGLLITSLGSAFRGAADDIIIMYMATMITGLGVAFMQPALPSIVKDWFPKHIVIATAIYVNGLLLGGEVIPVAVTKSILLPMLGSWRLTYVFWAAITLIIAVFIYKLAPKNKHEIISINKNIKWVPEWNNIILWKLGLMMGCVNATYFATNFFIPRYLHETNFEDLTSISLVALNLGQIPASIILMMTSATVAKLRYPYLISGIGLIASFSSIMYFGTEYIVISSAFIGFFSAIVLILMLGLPSMISEPHEVHRSTSLMLTVGYTCAVITPVISGLSWDISGNPSYVFLPMMICSVILLISAIKKPIVNKVIKNKIZ

SEQ ID NO: 3290 - protein, 209 aa, Photorhabdus luminescens
MVTALTPYQFRFCPASYIHSDHLSPEWLTVLSSLPEWRHSPRLNGLLLTQFDLNVDYELPTGLGNIALLEQSCLEQLLTWLGALLHGQAIRHCLMATELRHLHDSLGKEGHRFCLKYLDIIIGNWPTGWQRSLPPEINANYFRTSALQFWLTAMESPPIDFAKRLSLRLPSYENLAAWPVSQAERPLAQALCLKLAKQVNTECYHLLKZ

SEQ ID NO: 3291 - protein, 395 aa, Photorhabdus luminescens
MTALPLSGIVVVDLTRHRAGPVTSRLLGDWGAEIIKIEEPTDKGDSMGGARESFDYQNLHRNKKSLSVNLKTKQGQEILQRLVCKADIVLENFRPEVKFRLGVDYESLKKINPRIICGSISGFGQNGPYSSRPAVDQIVQGMSGLMSVTGTQESGALRTGVAIADISSGMNLAQAVLLALYHREKTGEGQWVYTSLLESTLAIMDFQVARWLADGKTPELMGNDHPTLMPTGVVRTKDGEINIAAAEDEKFRKLCHLLDIEEVYLNPQYSDIYNRSKNRKQLMDEIQAVTRKFESKQLIQILNENGIPSGYIYDIAQAMSDPQIQYLKMKCSIKHPLLGDLTLVGQPMHLSAFSDFDTVRNPAPEHGQHTENLLKNFLGFDSDEIALFRKIEVIZ

SEQ ID NO: 3292 - protein, 411 aa, Photorhabdus luminescens
EMNPRSWLMNLQWAKEGTRRVPSKIYICNQIYEQEIKNIFLGNTWNYVGLSSEVENFGDYIQTFVGNIPVILIRDRKGILRVFVNRCPHRGAKICHNPQGNTKLLVCPYHEWAFSLEGNLAGMPFRKGINGKGGMSEFFHPEEHGLQALNVTERHGVVFASFSYDIEPFETYLDPVMLSYFDRVCDGRKLKVIGKMQHRVNCNWKLQIENVKDPFHAALLHSFFKNFGIWRSDQKTSVKVCSSGKSSVLVSTASFTKAEIKKNAETKTELSLLDPRIIDHQREYDHGTGAIMTVFPNLILLQQLNCLAMRHVIPDGTDSCIKIWTFFGYENESEALTKRRLFQANLLGPSGLVTIDDNEILAVTQEGAKSMPDSEIILEASVGESSEDHMMTEAAIRGFYKYYRGVMNLGZ

SEQ ID NO: 3293 - protein, 366 aa, Photorhabdus luminescens
KMKKLSKVTLVKRDHIPSIRTIEVNGVEHWLGHVKDFMKNNQLSDFLPDDNRISMAWVRLEAGEELVPHIHPVESMILLCEGSAESTGDIQTAMEAGDALLVPPGHLHGFKGGYPDGFWGLSIQFDSRGLYEDFTDPWATFLPEQVNKNLATTIAEQLFSRNEIYMERFDKHKLFALVNRGLLKKTQAKKRFLDCFQVWSDHFQKMVLTRAATLHNAVFEEITMSHLEEELGHNRALKNNRVDFEPVFDPVLEAASSWFAYKMTTATELEKVVLVHLVVEASAIFFYKHIKPVMDDTTPKAHFDVHSILDDEHVRMGYEFISNYNIADGKPLFEIQNKGWAMLMTVMSRIADLTVYESSAIGNESZ

SEQ ID NO: 3294 - protein, 223 aa, Photorhabdus luminescens
MLRFITPFLLVFFMGQVQAGITLGGTRLIYNGSQKEATISITNSDTERPYLVQSWVDNIDNNQNKVPFVITPPLFKMSKESEHQIRASYIGNHLPVDRESIFLLNVNAIPAVEKNDNSKMIITIKNIIKLIYRPSGLSDNEANDAINRLAASRNAHGVQLTNPTAYYVNLNEMKINGTLIPKPGFIPPFSHKVFSTKNDIKSVTLTAINDYGGTTEERQFNFZ

SEQ ID NO: 3295 - protein, 841 aa, Photorhabdus luminescens
LIILSDECIVKKIISFALMICCLSLPAYAELYFDINALQLSDEDRENINLESLAKTDAHIPGIYKVNVIVNKRDIGIKSLSFIDCGEKLCPELSIRLLKEIGVKIASFPELASLAEQEIISQPEKYIKQASAELDLSALTLMLNFPQAAMQSQIRGDISPEQWDDGLPMFFTNYHLTGMQSWNKNQSEQNQYLNLRSGFNLGPWRIRHNSYYNHTGTTSEWQSLKAYAERDIRPLRSRLVLGETSTDSMVFDSFTFNGIKLMSDSQMLPDSQQGFAPVVRGIAMTHARVEVHQKDNIIYQTFVPPGAFEITDIYPSNLNGDLEISIYEENGNIRKFTQPFAASPLMIRAGQMKYFANIGKFSGGKQASKKRFIQTEAIYGLWDSTTIYGGVIISSDYQSHALGLGHNLGKIGAVSIDVTNAATHFPNGEKKSGQSYQIRYSKGFTETNTTVTLAGYRYNTNGYYSFSDANNNYSNNNDPFADHSRNSAPKNRMQITMGQNLGQYGNLSLSAWQQDYWQDKTRKNQSYSMSYNTNIHDISLSLSYNYHRNRSSINNDQVFSFNISIPLDKWLPSDNHSASVDYDTAYNTNGSSQHSMTLSGSLLEQQNLNYMISQDYSYEKSEKEKQSGNAASLYYRGSYGSINVGYTTDHRKNQRVNYGLEGAIIAHPYGVTLAQNISESGASALIRAPGATNAKVLNNTSISTDWRGYTIVPYISQYRENMLSLDTNTFGDDVDIDNPTTKVIPTKGALVLADYSIRVGHRVFLTLQHHGKKLPFGTIITGPDNVNGMVNEKGEVFLSGVSDTAKLTADLGEKQSCHIKFDSKLYQKINGIILTSLRCQZ

SEQ ID NO: 3296 - protein, 333 aa, Photorhabdus luminescens
YLPRKSMRNKLIILATLLLTLLNITKSIATCKLSKNFKSIDLNVEINEIINSPNNHKAHILIAQYGPMELASKIGIKADAAIANCDSNATVLFKTAPNKIAPANNPNNSGLIKTSANNISFYVKYLGSGKSNPKNKKLSLKDIGEVQVYLYQHGDLTPKDKLKKGLISSLSTYDDKELIRIKYKKENVIKNTGCMTSTPYRKLVLGSHKISDFNGKWQAARKSSPFNISIECKGNILPTIVFSGETIAEVPDKDKDSVIRLNKYGSGKEAKGVGVQMIHKGIPVAMQKPITVTPSGRIGVYSIPLFAHYYQTDDTITGGTANALVQFTIKYKZ

SEQ ID NO: 3297 - protein, 343 aa, Photorhabdus luminescens
ISIGIDMKYYLRLLISAVLLFNINKIHAACISESTTGNGTVYFDLNSLKLNLNTSNTKSIHVVRFSAEQLASSMGLNINDPIFSCDDNGYLVFGESVYPSMAGNTEHGTGKLTTGIDNLYLYFVAATGNLNNMKYPTIDGRSYIYYPPEKKKITWKDIGDIDVYLYKEGEIKSGKSLHAGIISLLQTSNGIRLITIRNKTRYHVTAQGCMALSGDQTVRFHDVYSSSFKGKGTTAGHADFNINIECTERIKPTITFSARTISDAPESIIQLNRTNATNTAKGVGVQILYMGTPVPIGKPFAVGYSDRNSRYNLPFTARYYQTDDRITGGKANAIAHFTVQYEZ

SEQ ID NO: 3298 - protein, 259 aa, Photorhabdus luminescens
TGQHFLIWIINMEQTVIHTNQASLPEYDNGFITQIEYGTVVKHPQVHFWHARFDLSYYHDELFEQLNLPFPATLTKAVKKRRAEYLAARYCARQLLAQLGQPAFNLISGHDRAPIWPQNICGSVSHSSHCAIVLAAPQTHNRLIGVDIEAIVDRQNIDEITKMIVNDKEIQLLKHCHLPLEQAFTLAFSVKESLYKALYPQVKRFFGFEAAEIIALSLENNEITLALRETLTPHYPAGTLFRGQFIIYPQEILTLIIQZ

SEQ ID NO: 3299 - protein, 211 aa, Photorhabdus luminescens
MKGTVFAVALNHQSQVDFWHGSFQQTPYNTLPKTPVWFIKPRNTVITSGEAIPHPVGEEVQSGATLALIIGKTARKVAIENAAEYIAGYALANEVSLPETAFYRPAIKAKCRDGFCPIGQMTHPESIDALDIITEINGQEVDRWSTADLVRSATELVAALSDFATLKEGDVILLGTPHQRVAIKPGDKVVIRAAGFPSLENQVVQVGEKAZ

SEQ ID NO: 3300 - protein, 254 aa, Photorhabdus luminescens
MKHARVHYQGRDLIVTVDEQENVCLPDGSKINSESVQWLPPANGTLFALGLNYADHATELEFKPPEEPLVFIKAANTLTGHRQVSVRPDHVEYMHYEAELVVIIGKTAHKVTQEHAMDYVAGYTVCNDYAIRDYLENYYRPNLRVKSRDTLTPIGPWFVDKEDVPDPHNLTLSTWVNGELRQRGTTADLIFNIPFLIAYLSDFMTLQPGDMIATGTPKGLSDVVPGDEVIVEVEGVGRLVNRIVSQQEYEESLZ

SEQ ID NO: 3301 - protein, 206 aa, Photorhabdus luminescens
MLPFIKITTGHLQLSPELQILRKADYQTCLSAKSLLEAARLQAQEIERDAQAVYEQQKELGWQAGIDAARAEQANLIHQTQLQCQQYYRQVEQQMSNVVLQAVRKILKNYDQVSLTLQVVREALSLVSNQKQVILRVNPEQAATVREQISRVHKDFPEIGYLEITADERLDQGGCILETEVGIIDASLDSQLEALMSAINNQWQSZ

SEQ ID NO: 3302 - protein, 489 aa, Photorhabdus luminescens
MTVISHWINGKNISSKTYFETTNPATGEVLAEVASGGQEEVDQAVAAAKAAFPKWADLPMKERARLMRRLGELIDENVPEIAAMETKDTGLPIHQTQNVLIPRASHNFNFFAEICQQMNGRTYPVDDKMLNYTLVQPVGVCALISPWNVPFMTATWKVAPCLALGNTAVLKMSELSPLTANRLGELALEAGIPAGVLNVVQGYGATAGDALVKHHDVRAVSFTGGTATGRQIMKNAGLKKYSMELGGKSPVLIFEDADIERALDAALFTIFSINGERCTAGSRIFIQQSIYPEFIKRFAERANRLRVGDPQDPTTQIGALISKPHWEKVSGYIRLGIEEGATLLAGGPDKPIDLPAHLKDGHFLRPTVLADVDNRMRVAQEEIFGPVACLLPFKDEAEGLRLANDVEYGLASYLWTQDVSKVLRLARNIEAGMVFVNTQNVRDLRQPFGGVKASGTGREGGEYSFEVFAEMKNVCISMGDHPIPRWGVZ

SEQ ID NO: 3303 - protein, 293 aa, Photorhabdus luminescens
MGKLALAAKITHVPSMYLSELPGKHHGCRQGAIDGHKEISRRCREMGVDTIIVFDTHWLVNSAYHINCADHFSGIYTSNELPHFIRDMSYEYDGNPELGQMIAEEARNVGVRAQAHEIPSLKLEYGTLVPMRYMNSDRHFKVISVSAFCTVHAFEDSRRLGEAILTAIEKYDGTVAVFASGSLSHRFIDDQRAEEGMNSYTREFDEQMDHRVVQLWKEGKFKEFCKMLPEYADYCYGEGNMHDTVMLLGLLGWDKYDGKVEFLTELFASSGTGQVNAVFPLPDYITDKPAIPZ

SEQ ID NO: 3304 - protein, 413 aa, Photorhabdus luminescens
GVVMPKPFHQHPPRWLIPLLGALVAFGPLSIDMYLPALPEMARQLQATQGQMQHTLGAFFAGFCIGMLLYGPLSDHLGRRKLLLSGIALFVVASALCTLVTQVEQLILLRALQAFGSGAAVVMGRAIARDIYGPQELPRVLSLMTLVTMIAPLIAPLLGGLLLTYFNWQAIFTLLGLFGCISGILLLFFLPETLPAQHNGGKLITAFKNYGKLLTDGEAMATIGTLAFTCAAMFAFISGSPFVYINYFQVPANYYGLLFACNALGMMAVVLLNVRLLKVYDVSRLLFIQTSAQLLFGILLVIFYQQSLTVIVILVVLFISLVNAIGTNSLSLLLQHRGQLAGSASALAISAQFAMAAFASVAVSLLQDETPFAMALVMTVCAGLSWLCQQLATFYRRKPLTQVSLGEKNHDKZ

SEQ ID NO: 3305 - protein, 491 aa, Photorhabdus luminescens
MTNNVNTELLRQQAYINGQWVDADNQATFKVTNPANGEVIAHVSNMGAAETERAIAAAQQALPAWRTMTAKQRSQILQRWFQLMMANQPALAELLSREQGKSQTEAMGEIAYGASFIEWFAEEGKRTYGETIPSPLPGRRIVTIKQPIGVVAAITPWNFPNAMITRKVGPALAAGCTVILKPASETPLSALALAALAEQAGIPAGVFNVVTGIDAKAIGGAMTQSPIVRKLSFTGSTRVGKLLMAQSADTVKKLSLELGGNAPFIVFDDANIDAAVQGALIAKFRNSGQTCVCANRILVQETIYDTFAERLAQAVNQLQVGPASDAKSQQGPLINQAAVDKVEEHISDAISHGARILAGGKPHALGGLFFEPTVLADVNKSMLISQEETFGPIAPLFKFRDEAEAIHLANETEFGLAAYFYSRDIGRIYRVAEALESGMVGINEGLISNEAAPFGGIKQSGLGREGSRYGIEDYLEVKYLCFGGIEDTGVZ

SEQ ID NO: 3306 - protein, 268 aa, Photorhabdus luminescens
MLQKEVVSQVAHRLHQAEKSREQIRQISLDYPEITIDDAYAIQRHWVELKIAEGRVLKGHKIGLTSKAMQASSQISEPDYGALLDDMFFPDGSDIPCDRFIVPRIEVELAFILAKPLCGPNCTLFDVYNATDYIIPALELIDARCHNIDPETKRPRKVFDTISDNAANGGVIMGGRPIKPDQFDLRWISALLYRNGVIEESGVAAAVLNHPANGVAWLANKLAPHGVQLEAGQIILSGSFTRPVPANKGDTFHVDYGPLGAISCRFVZ

SEQ ID NO: 3307 - protein, 278 aa, Photorhabdus luminescens
LPFCLTRKNMDRLTNKFKQALKAGQPQIGLWLGLCNPYSAELVAGAGFDWLLIDGEHAPNDIQTILSQLQAIAPYPSHPIVRPPWNDLVIIKQLLDIGAQTLLIPMIQNAEQAYEAVRATRYPPAGIRGVGSALARASHWNRIPDYLHRANDEICVLVQVETREALRNLPEILKVDGVDGAFIGPADLSSDMGFTNNPQHPEVKDAIEQAIAQIKAAGKAPGILMSAPNVAEHYLKLGALFVAVGIDTTLLARTAEALAARFIADKEPPVAPLSGVYZ

SEQ ID NO: 3308 - protein, 459 aa, Photorhabdus luminescens
MSDSSTVVQQPDLPVGQHKPLTAQQQSVINKLFRRLIIFLFVLFVFSFLDRINIGFAGLTMGKDLGLNATMFGLAATLFYVTYVIFGIPSNIMLSIVGARRWIATIMVLWGISSTATMFATGPTSLYILRMLVGIAEAGFVPGILLYLTYWFPAYYRARANALFMVAMPVTMAFGSLASGYILEMDGLMNLHGWQWLFLLEGFPSVLLGIVVWFYLDDSPKRANWLTDEDKKCLQEMMDNDQPALVQPASSSTHQAMQKPSIWREIFAPIMLMYTLAYFCLTNTLSAINIWTPQIVQSFNQGSSNIMIGILTAIPQFCTIIGMIYWSRRSDRLQERKMHTALPYLFAAVGWILTSLTNHSVIQLIGIIMASTGSFTAMAVFWTTPDQAISLRARAIGIAVISATGNIGSALSPLLIGWLKDQTGSFNTGLYFVAGLLVVGAAIIWLIPMKHARQRTAPZ

SEQ ID NO: 3309 - protein, 297 aa, Photorhabdus luminescens
MTEPIIANIDISKDYDETQGTDDVHYQTFGRMAAFFGRNMQAHRHDGFFQLHFLITGHIELQLDAQHYSVQAPLFILTPPSVPHAFFTQDDSDGYVLTVRQDLILPLLESLYPANKDILDIPAICLSVVDKPEELAAFNHYWALIARESSNNFIGREQSLTFLAQAIFTQLLRNIPLDDHPVNGVRGEIKLFQRFNQLIDNHYHHHLSVPEYAHKLDITESRLKDMCRRFTNRPPKRLIFDRQLREAKRLLLFSDCPVFEVAYQLGFKDPAYFARFFNRLVGCSPSYWRERNIHEKZ

SEQ ID NO: 3310 - protein, 249 aa, Photorhabdus luminescens
MQKITLITGGSRGIGRATAFYLAKKGHHICIGYHTNQEQAQEVIEIIHNIGGKAIAIQVDVADEKQVVELFQRIDTELGCITGLVNNAGILKPQASIEQLTAHRLHDIFATNVIGSFLCAREAVKRMSFRHGGHGGSIVNVSSAASRLGSPHEYIDYAASKGAIDTLTIGLSLEVADQGIRVNAVRPGFIYTDMHADGGEPNRVDRVKNSLPMKRGGQPKEVAQAIVWLLSDEASYVTGNFIDLAGGKZ

SEQ ID NO: 3311 - protein, 960 aa, Photorhabdus luminescens
MKNIDPKLYQHTPTISVYDNRGLTIRNIDFHRSVAGGDTDTRITRHQYDVRGHLSQSIDPRLYDAKQLDNSINPNFLWQHNLTGDTLRTESADAGRTVALNDIEGRQVLIVTATNAIQTRQYEANTLPGRLLSVSEQAAGEKIPLVTEHFIWAGNTQTEKDHNLAGQYVRHYDTAGVTQLKSLSLTENILSQSRQLLADGQQADWTGNNDPLWQTKLSSEIYTTQSTFDATGALLTQTDAKSNIQRLAYNVAGQLKGSWLTLKNQSEQVIIKSLTYSAAGQKLREEHGNGAITEYRYEPETLRLIGTTTRRQSDNKVLQDLRYEHDPVGNIISIRNDAEATRFWRNQKVVPENVYTYDSLYQLISATGREMANIGQQSNQRPSPIPLPTDNNTYTNYTRTYDYDRGGNLAQIRHSSPASQNNYTTDITVSNRSNHAVLNSLTTDPTQVDTLFDAGGHQKKLLPGQDLSWNARGELQQVTPVNRENTSDREWYRYGNDGMRQLKVNEQQTGNSTQQQRVTYLPGLELRTTQNGTTTSEDLHVITVGAAGHAQVRVLHWATTPPAGISNNQLRYSYDNLIGSSQLELDNEGQIISQEEYYPFGGTALWAARNQTEASYKTLHYSSKERDATGLYYYGYRYYQPWVGRWLSADPAGTVDGLNLYRMVRNNPITLYDNDGLAPPRVRPRHPDSEGESESEDSSIGYRALRSDEHPSIHGLRPPEGANLNISAYAHVRAGTSAKVKSSWISYSRSLKVAASWAASSGSGRVVKFRIKKNNRSFDLTNKSDQIRMLQEQATSSHSEINLDPNKHPAINFAKGSQEGLVYGKVDKSQIIAEYQAEKTTEPEYSEYKSLKEKNTPDDTWKLIKSRTTVMKKIDGVKVKTTPKPVLITETYNENSFLNQARGEWDELQKKASPLLIGHLESEGLSPYEMDYISNKSEYKKYREDVRNSIAKYRNNLRNZ

SEQ ID NO: 3312 - protein, 311 aa, Photorhabdus luminescens
QPRRIIQLTTVDRQGVFGYHLSGGIGEGMACGLAVNVLCQQHPLGVIQRLASRSQSGFGFKMAVSVLNSFANGEGGAVPGGNNAPPAIIQLSGAKLERVARFQFARLIIQRVFDGQFQRTLVGGHDIAVTIIDGRCLKVQVAIARNSAAVVIQYPGSEGQVILTPLLHHAALMAQGVGVDGYLPGLSFGVVELQFTGLYRQGAIGQQFALITQPPLRVERQFPVACQLHRSLVVIGLMRGEMQVLALTGNSALMVVEPVSGEGQFPLIEHGPLTVIQGAGMERQFTSTGLINFSLQVRDIRRREVDCSRHZ

SEQ ID NO: 3313 - protein, 329 aa, Photorhabdus luminescens
PLSPISSINHQRIFPTQQLDTTAVNQPQGELSGKSLKVSSPRPGLLERLSAAIQRNLPGHSMLDRQLTTDGKKNQESRFSFSMIKDRIVHFAVSTTLGSVRNSASKHGGEITFKFAQTKGTFLDQIMKHSDTAGGVCESISAHWISAHAKGESVFDQLYVGGQKGQFHIDSLVSIKQLQMDGIAQDVDQDTMTESWLSENGIQPRMKTITYQSANGPINYKRPIEVNGQTGSNGTSDLLNAILDTGDKGSSYKKISFSGQMAGHAVAAYVDDQKGVTFFDPNFGEFHFPNKESFSNWFSQDFWSKSMYNKEIGLGQHFQVLNYEPKTQZ

SEQ ID NO: 3314 - protein, 521 aa, Photorhabdus luminescens
MKPEDFRADKKRPFTGEEYLKSLQDGREIYIYGERVKDVTTHPAFRNSAASIGQLYDALHAPETHDTLCWNTDTGSGGYTHKFFRFATSADDLRQQRDAIAEWSRQTYGWMGRTPDYKAAFGNALGAFPEYYGQFADNARVWYKRIQETGVYFNHAIINPPIDRHKPIDQTRDVYIKLEKETDAGIIVSGAKVVATNSALTHYNFIGFGSAQIMGDNPDFALMFVTPMDAEGMKLISRGSYELVAGVTGSPFDYPLSSRFDENDAILVMDKVLIPWENVLIYRDFDRSRNWAVQAGFANLFPLQACVRLAVKLDFITALLQRSLECTGVIEFRGVQADLGEVVAWRNLFWSLSDAMWAEAKPWKGGAYMPDTQAIQTYRVMAPTAYTKIKNIIESNVTSGLIYLPSSVRDMNNPEIDKYLARYVRGSNGIDHVERIKILKLMWDAIGSEFGGRHELYEINYAGSQDEIRMQCLRHAHGSGNMKKMMDMVDRCLADYDQHGWRRPHLYNNNDINQLDKLLKZ

SEQ ID NO: 3315 - protein, 490 aa, Photorhabdus luminescens
MNKPASIGLLQQPKPFFMIFFVELWERFGYYGVQGVLAVYFVQKLGFSQEQAFITFGAFAALVYGLISIGGYVGDHLLGTKRTIVLGAIVLAIGYFMTGLSILHPDLIFYALGTIAVGNGLFKANPASLLSKCYPPKDPRLDGAFTLFYMSINLGSLFSLALAPVIAEKFSYAVTYNICGIGLIIALLVYILCRNTVRNIGSEPDHQPINYKNLFLVLAGSVVMVYVCAWLMHNVKIANIVLITLSAIVVFIFFREALKQDKASRNKMFVAFILMLQAIVFFILYAQMPTSLNFFAIHNVHHQLLGFDINPVSFQALNPFWIVVASPILAALYTHWGAKGKDLTMPAKFAVGMFLCSLGFLTAAAAGLWFADEQGLTSPWFIVLVYLFQGVGELMISALGLAMIAALVPQYLMGFILGMWYLTQATSSLLGGYVAALTAAPKGITDPLQTLPIYTSVFGKIGIATFIVAIIMAVTVPWLNSMMNEKQKIZ

SEQ ID NO: 3316 - protein, 241 aa, Photorhabdus luminescens
QMNTNWMNEEASNLFDQYDDYLEDRLGYTPLIENLKESLGQNVSVLDYGCGGGKVSRRLIAGGIKTVTGVDISQTMVDKAASNINRGNSSYHQITTDVLNFNDNTFDAAICCYVFVTNSEKSDLLKIAKEVHRTLKPGGIFYVLDTNPDSCGIKFKSFMSGDLNKKYNDGEIKPVYLELSNGTIFKISDTHWHKDTYYQILNEAGFKTIELFEHNDADALEDTGDLRCYPPFAMFKATKFZ

SEQ ID NO: 3317 - protein, 2222 aa, Photorhabdus luminescens
HLKGINMSTVTPERPEMTQQEQKANQLHEASILKRANPQLQNAVHLALTTPHADQQGYNSKFGGRASQYVAPDAVASMFSPAAYLTELYRQARDLHAESSIYHLDKRRPDLKSLILSQQNMDDEISTLSLSNKVLLEGIQTQAGQQGHTHVMKALSTFHSSGSLPYHDAYENVRKVIQLQAPVFEQFNTSPETTIAKLKYQTSLLGINISISPELFNILTDKITDDEEEIKRLYKKNFDDIQPSLMATLEYLKIYYNLTDEEINQSINQRNIERIHNEMNSKYGSQQPAQYYLLKLNKIILVSRATDMAPEILKKIASSRTYHAISQPMEVILEYNPTIYDELNDIPDINTEILKKIFRVKYYMQRYNIDAETALILCNAPISEDYYSPSPNQFNRLFNTPPLNSRDFYASDEEIDLSQNSADSRQKEVLKRAFNVDDISLYQLLKMTHRDNGNGKIINNLTNISYLYLTKLLADVHQLTVNELNLLLIAIGEGSTSLSGISDDNLSVLIDKLYNVTQWLHAQKWNKCLLFMMTTTDYNKTLTPEIQNLLDAVYNGLQDLNSENEANLLLKISPYIAAALQLPSENSAYYMLTWADQLKPGSGAMTAKKFWKWLQSQHTPEQSTTETEEQAVQYCQCLAQLALIYHSIGLSESTLRLFVTKPQHFGLTAGATSTHNALSLIKLTRFADWVNSLGEKASSVLTEFEKGTLETKQLADAMSLDKNLLEQASTHVQVNFSNWASLDTIQQWVNIARQLNISPQDVSTLAQVLDIEPSTDYSQWEKIAAILTAGLDTQQANTLHTFLDESRSTALSEYYIHKVANAEAKIKNRDDLYQYLLIDNQVSAAIKTTPIAEAIASIQLYISRALKNMEGNAVSQVANRPFFTDWDKYNKRYSTWASIAKLIYYPENYIDPTICIGRTKMMDTLLQSISQSQLNTDTVEDAFMSYLTSFEQVANLEIVSAYHDDINSNQGLTYFIGHNKTEVNQYYWRSVDHNKFNDGKFPANAWSEWYKIDCPINPYKDTIRPVIFQSRLYLIWLEQKKIAKQTDNNQTIECYYYELKLAHIRYDWTWNTPITLEVHDKISAVLKTSDLLDQLQEYQKQLEDKLKEQQEEVERLKPIAPLNPVSPPQPIAPLKSLQLLPPLIEQRKKQLAQWERELNEQGQSTTEISVREKQLELNQQDIQKELDRLESELIRKQPGFYCANHQDNKLLVIFYQKQDALDKYTTDAPIKGLYISSNILPEDINLGDYIPNIRNQFDTDIGVNGIIKVNNRYEVSSSIEISDHNILTLYHDTNGAQYMQWGAYRIRLNTLFARKLVSRAMSGIDTILSMETQKLSEPQLKAGFFANFTLPKYDQNIHGNERWFKIHIGNINGDNSMRLYYQGTLTDNETSITLFVPYKKDLYTMEGVRIGVQYKQKFYQDWWEPAFFYFNETQQKFVLINDTAHDSAMTHGGERSPVKKYQGFSNVSVLSEHTEPMDFNGANSLYFWELFYYAPMLIAQRLLHEQNFDEANRWLKYVWNPSGYIEHGQIQHYRWNVRPLLEDTRWNDDPLNSVDPDAIAQYDPMHYKVVTFMRTLDLLLDRGDYAYRQLERDTLNEAKMWYMQALHLLGDKPHLSFSSEWCKPSLGDAARTEKQEEHAQAMTALRQGDISRHSNPTDLFLPQVNEVMQNYWQKLEQRLYNLRNNLSIDGQPLHLSIYATPADPKALLSATVASAQGGNKLPTPFMSLWRFPQMLENARGMVSQLTQFGSTLQNIIERQDAEALNTLLQNQAAELILTNLSIQDKTIEELDAEKIVLEKSKAGAQSRFDSYKKLYDENINAGENRVMALHASIAGLSTALQASRLAGAALDLAPNIFGFADGGSRWGAIAEATGNVMEFSASVMNTEADKISQSEAYRRRHQEWEIQRNNAEAEIKQIDAQLQSLAIRREAAVLQKTSLKTQQEQTQAQLTFLQRKFSNQTLYHWLRGRLAAIYFQFYDLAVARCLMAEMAYRWETNDTAANFIKPGAWQGTHAGLLAGETLMLNLAQMEDAYLRWDQRALEVERTISLTQFYGALPEKSFNLATRISALLAGGTTDPVDHPPVTLENDQLSAKISLSDLSLHSDYPEGNGVGNIRRIKQISVTLPALLGPYQDVQAILSYGGSETGLAESCKSLAISHGINDSGQFQLDFNNGKLLPFEGIAINDTGTLTLNFPNATSKQQAMLQALSDIILHIRYTIRQZ

SEQ ID NO: 3318 - protein, 2499 aa, Photorhabdus luminescens
MVFLFDHYFQPNFRPLSNVTCVAFIWMEINNLIYLHEMQASINVLLTQYLKGISMNTLKPEYQQALGADFNLTDICHLSFDELRKKVKDKLSWSQTQSLYLEAQQMQKDNLLHEARILKRANPQLQSAVHLALTTPHADQQGYNSRFGNRASQYAAPGAISSMFSPAAYLTELYRQARNLHAEGSIYHLDTRRPDLKSLVLSQKNMDTEISTLSLSNNMLLNSIKTQTNLDSHAEVMEKLSTFRPSGSMPYHDAYESVRKIIQLQAPVFEQLSVFPETTLSQLKYQASLLDINASVSPELFTILTKEITGSTTETLYNNNFGDIKPSLTKKLEYLKSYYNLSDEEFSDFLKIRTILLPEEEITITEPASHTTNTQQTIEKTDYRALLKINKFIYLFKAINLSPTVLSGILRSISPEFNINEEVLKKIFCIKYYMQRYGIDAETALILCKATISQHSNDGHPSQFDRLFNSPKLNGQGFSTNGTPEINLNLSNTNDRNKTVLKLAFNLDDISLNRLLKVTNPVNTTEMITNDIENLSHLYRTKLLADIHQLTIDELSLLLITIGEEKTNLSTINNTDLVTLIDKLYAVTRWLRTQKWSVYQLFVMTTTNYDKTLTPEIQNLLDTVYNGLQNFDKKKAKTKEELLKAISPYIAAALQLPSEHAAYFILTWADKLEPGTGNMTAEKLWNWLRINPVTAQPEFQKQAELVVQYCQCLAQLALIYRSIGLNENTLRLFVTKPQHFVIKTKKTETIEATETTETIPAHDVSTLMSLTRFADWVNSLGKNASSVLTEFEKKTLTTELLAKAMNLDEKLLSQAKTQAETDLSNWSSIDSLLQWINISHQLNISPQGVSALTQILNTESSSDYTQWENVAAILTSGLNTQKANTLHAFLDESRSAALSTYSIYSHNQKDREERKHTVIKDRDDLYQYLLIDNQVSSAIKTTEIAEAIASIQLYINRALKNMEEDTDTSVTSRSFFTNWDKYNKRYSTWASIAKLLYYPENYIEPTLRIGQTKMMDALLQSISQSQLNTDTVEDAFKSYLTSFEQVANLEVISAYHDNINNDQGLTYFIGRSKTEVNQYYWRSVDHNKFSEGKFPANAWSEWHKIDCPINPYEDTIRPVIFQSRLYITWLEQKKVTHRSEGETLPKVEALSEIKTDKQGSKTTTSYYYELKLAHIRYDATWNTPITFDVDKKISDLNLEANKVLGLYCASYQGKDKLLVMFYQKGPEQASYINAPMQGLYISSNMSQEEMNPNDYKLNIHKQLDTHTATNSVIRVNNRYAESYEIPSSVNNNNGYDWGEGYLSMVYGGSILITRNQSDNSKIQISPKLRIIHNGYEGRQRNQCNLMKKYGKPKDKFIIYTTLGINQNNLSNKKFIYPVYQYEGNASQLSQGRLLFYRDSATNFVRAWLPNLPSGSQEMSITTGGNISGNYGYIDNKHSNNNPFKEYFYMDDHGGIDTDVSGPMFINTNIQPSNVKITVKTVKEDGKLTSEPYTANDKVSVKPPLNFEEMCYQFNGLKEIDVSKLVFKNNEASIDITFTAFADAFESGQKERNLGEEHFSIRIIKKSETNNVLSLHSNSSGAQYMQWGAYRTRLNTLFARKLISRANAGIDTILSMETQNIQELQLGKGFYATFVIPPYNPSTHGDERWFKLYIKHVSDNNSHIIYSGQLKDTNISITLFIPLDDIPLNQDFHAKVYMTFKQSPSDGSWSGPHFIRDNKGIITINSSSILTHFESVNVLNNVSSEPMDFNGANSLYFWELFYYTPMLIAQRLLHEQNFDEANRWLKYVWNPSGHIANGQKQYPHTWNVRPLQEDTSWNDDPLGSFDPDAIAQYDPMHYKVASFMRTLDLLIEQGDYAYRQLERDTLAEAKMWYMQALHLLGDKPHLSLSSTWNDPELEEAADLEKQKTHAKAVADLRQGQSTGGSNTDLFLPQVNEVMLSYWQKLEQRLYNLRHNLSIDGQPLHLPIFATPADPKALLSAAVASSQGGNNLPSAFISVWRFPHMLENARSMVSQLTQFGSTLQNIIERQDAEALNTLLQNQAAELVLTNLSIQDKTIEELDVEKTVLEKTRAGAQSRFDSYSKFYNEDINAGEKQAMALRASVAGISTALQASHLAGAALDLAPNIFGFADGGSHWGAIAQATGNVMEFSASVMNTEADKISQSEAYRRRRQEWEIQRNNAETELKQIDAQLGSLVVRREAAVLQKTSLKTQQEQTHAQLTFLQHKFSNQALYNWLRGRLSAIYFQFYDLTVARCLMAEMAYRWETNDAAARFIKPGAWQGTHAGLLAGETLMLNLAQMEDAHLKQEQRVLEVERTVSLANIYKEKGQFSLTEKIAELMKNKLVTAGSGNNTLKFGTGNAQTSLQASISLADLQIRHDYPENSGVGNVRRIKQISVTLPALLGPYQDVQAILSYSGDVTGLAESCKSLAVSHGMNDSGQFQLDFNDGKFLPFEGIDIDKGTLTLSFPNAIGEGSKEGKQKTMLESLSDIILHIRYTIRQZ

SEQ ID NO: 3319 - protein, 1476 aa, Photorhabdus luminescens
MQNSQDFSITELSLPKGGGAITGMGEALTPAGPDGMAALSLPLPISAGRGYAPSLALNYNSGAGNTPFGLGWDCNVMTIRRRTHFGVPHYNETDTFLGPEGEVLVVADQPRDESTLQGINLGATFTVTGYRSRLESHFSRLEYWQPKTTGKTDFWLIYSPDGQVHLLGKSPQARISNPSQTTQTAQWLLEASVSPHGEQIYYQYRAEDNLDCETNEITLHPQATAQRYLHIVYYGNRTASETLPGLNGRAPSQADWLFYLVFDYGERSNNLKMPPAFTATGNWLCRQDRFSRYEYGFALRTRRLCRQILMYHCLQALDNKIKEHNGPTLVSRLILNYDESAIASTLVFVRRVGHEQDGTAVTLPPLELAYQDFSPQHNTDWQPMDVLANFNAIQRWQLVDLKGEGLPGLLYQDKNAWWYRSAQRLGEIGSDTVTWEKIQPLSVIPSLQSNASLVDINGDGQLDWVITGPGLRGYHSQRPDGSWTRFTPLNALPVEYTHPRAQLADLMGAGLSDLVLIGPNSVRLYANTRDGFAKGKDVVQSGDVTLPVPGADPRKLVAFSDVLGSGQAHLVEVSATKVTCWPNLGHGRFGQPITLPGFSQPEAIFNPAQVYLADLDGSGPTDLIYVHTNRLDIFLNKSGNGFAAPMTLRFPEGLRFDHTCQLQVADIQGLGVASLILSVPHMTPHHWRCDLTSAKPWLLSEMNNNMGAHHTLRYRSSSQFWLDEKAAALVAGQTPVCYLPFPVHTLWQTETADEISGNKLVTTLRYARGAWDGREREFRGFGYVEQTDSHQLAQGNASERTPPAMTKNWYATGLPVIDNTLSTEYWRGDNQAFAGFSPRFTTWQDGKDILLTPEDDNSQYWLNRALKGQLLRSELYGLDDSTNKHVPYTVTEFRPQVRRLQQADNQYPVLWSSVVESRSYHYERIASDPQCSQDITLSSDLFGQPLKQVSVQYPRRKQPAISPYPDTLPDELLANSYDEQQRQLRLTYQQSSWHHLTDNTVRVLGLPDSTRSDIFTYEAKNVPAGGLNLELLSIKDSLIADNKPREYLGQKKTIYTNGKNAAPLQTPTRQALVAFTETTVFSQSTLSAFDGSIPSAQLSTTLEQAGYQQTNYLFPRTGEDKIWVAHHGYTDYGTAAQFWRPQKQSNTQLTGKITLTWDATYCVVTQTRDAAGLTTSAKYDWRFLTPVQLTDINDNQHLIMLDALGRPITLRFWGTENGKMTGYSSPEKAPFSPPSDVNSAIELKKPLPVAQCQVYAPESWMPVLSQKALNRLAEQDRQKLYNTRIITEDGRICTLAYRHWSQSQKATPQLTSLLNNGPHLPPHSLTLTTDRYDHDPEQQIRQQVVFSDGFGRLLQAAARHEAGMAWQRNKEGSLMISVKHTENRWAVTGRTEYDNKGQPIRTYQPYFLNDWRYVSNDSARQEKEAYADTHVYDPVGREIKVITAKGWLRRTLFTPWFTVNEDENDTAAEVNEVNMZ

SEQ ID NO: 3320 - protein, 971 aa, Photorhabdus luminescens
MKNIDPKLYQKTPVVNVQDNRGLTIRNIDFHRTTANGDTDTRITCHQYNTHGHLSQSIDPRLYEAKKTSSTIKPNFLWQYDLTGNPLRTESIDAGRTVTLNDIEGRPLLTVTATGVIQTRQYETSSLPGRLLSVTEQTPEEKTSRTTERLIWAGNTEAEKDHNLAGQCVRHYDTAGVTRLESSSLTGTVLSQSSQLLLDTQAANWTGDNETGWQNMLAADIYTILSTFDATGALLTQTDAKGNIQRLAYDVAGQLNGSGLTLKGQTEQVIIKSLTYSAAGQKLREEHGNGVITEYSYEQETQRLIGIKTRRSLDTNPSDTKVLQDLRYEYDPVGNVISIRNDAEATRFWHNQKVVPESTYIYDSLYQLISATGREMANIGQQSHPFPSPALPSDNNTYTNYTRTYTYDRGGNLTKIQHSSPATQNNYTTNITVSHQSNRAVLSTLTEDPTQVDALFDAGGHQNTLIAGQNLNWNPRGELQQVTLVKRDKSANDDREWYRYSGDGRRILKVNEQRTSNNAQIQRITYLPSLELRLTQDNTTTTEDLQVITVGEAGRAQVRVLHWESGKPEDIDNNQLRYSYDNLIGSSQLELDSKGEIISEEEYYPYGGTALWAARNKTEASYKTIRYSGKERDATGLYYYGYRYYQPWVGRWLSADPAGTIDGLNLYRMVRNNPIKYHDTDGRAPEIKDVEHTVIYGFSHHRGSEMGKAFAANKNPVTIDEYNAGLGIMGELSLSDYFRISQNLKEDSPPKLNEENIRTNSSKYLVAMGIEESSATDKIKQEAYEQQYAYTASWSFHMVENKGKLDIQSKVKNLLPSKSLFSGLSGQKRFQKLDAFILKNSDGSDFTIQRQRDILTKFASAGNTGELESTLSAADQSWLKNTIATAFFRQTSKLGMDWFIKQLASPDFRFVMAGYNGEKLTIEQLKSEQPWKTGKRRKEGPNEYAEAITFSEIRHAYRKKYDSTINFIQKZ

SEQ ID NO: 3321 - protein, 316 aa, Photorhabdus luminescens
YSISGIKTRGCVMIFCSKQLKYFMESAKKESFTLAADTLCITPSPLSRLVYQLEQRVGCQLFERLPGKTKLTEEGRALYQELLPCYERIQKVEDNWNCRRNCKSSSRDKLVIGTSGEYVNKISTVVKRAVQRYHYRDICIINNFLIDDLIRQDAVFSSLMKEDITVYVTTECYPDNDDIIRIDGAYQKLSLAVSNDILEPESHVDEIIYSFPLVQHNSAFLKQCDNFMPLNYPPEYQNLALLTIPDFTNRLELIKAGVAISLMTPNEMRYSAHIDKGITFLNFESYPEPSVRYCAYALRNKYKEPLNSLISDLIFZ

SEQ ID NO: 3322 - protein, 2466 aa, Photorhabdus luminescens
LNFIILSLLINHDVNNNSLFPPDLIKKQLQILRLLFLQQLFKENSDIVMILISYRTESLSSLIVSICIDGTEITRMFYLPYDLKGINMNSYVKEIPDVLQSQCGINCLTDICHYSFNEFRQQVSDHLSWSETNRLYRDAQQEQKENQLYEASILKRANPQLQNAVHLGITLPHAELQGYNNEFGGRASQYVAPGSVSSMFSPAAYLTELYREARNLHASDSVYHLDQRRPDLQSMTLNQQNMDTELSTLSLSNEILLEGVKANQPNLDNDTKVMAMLSTFRPSGTIPYHDAYENVRKAIQLQDPQLKQFQQSPAVAGLMHQASLLGINNSISPELFNILTEEITEANAEDVYKKNFGDIDPTWLAMPEYLKSYYNLSDEELSQFIRKYPNNELNTQKIHLLKINKIILLSRSVNLPFVKLDEIIPEQSINPSVLGKIFLVKYYMQKYNIDTETALILCNNSISQYSYRNQPSQFDRLFNTPPLNGQCFVTEDTNIDLNLNSTDTDNWHKTVLKRAFNVDDISLYRLLHIANHENKDGKIANNIKNLSNLYMTKLLADIHQLTIDELYLLLMTIGEDKRDLYTIDDKELEKLINRLDSLSNWLRTQKWSVYQLFLMTTTNYDKTLTPEIQNLLNTVYNGLQNFDENKKDLLTTISPYIAATLQLPSENVAHSILLWADKIKPSEKKITTEKFWDWLQNRGILELSKPPEMQEQIIQYCHCLAQLTMIYRSSGINENAFRLFIEQPTIFGISDEPDKATPAHNAPTLIILTRFANWVNTLGEKASPILTAFENKILTAEQLANAMNLDANLLEQASIQAQNYKQVTKENTFSNWQSIDIILQWTNVANDFNISPQGISSLIALDYIQPSQKTPTYSQWENAAMVLTAGLDTQQMNTLHAFLDESRSTALSNYYISKIANRAAAIKSRDDLYQYLLIDNQVSAAIKTTRIAEAIASIQLYVNRALENIETHAISDVITRQFFIDWDKYNKRYSTWAGVSQLAYYPENYIDPTMRIGQTKMMDTLLQSVSQSQLNADTVEDAFKSYLTSFEQVANLEVISAYHDNVNNDQGLTYFIGHSKTEINQYYWRSVDHSKFNDGKFAANAWSEWHKIDCAINPYQSTIRPVIYKSRLYLIWLEQKEIAKQDKDNKVITDYYYELKLAHIRYDGTWNTPIAFDVNSKISALELAKSQAPGLYCAGYQGEDTLLVMFYRKKEKLDDYKTAPMQGFYIFSDMSSKEMTNEQCNSYRDNGYTHFDTNSDTNSVIRINNRYAEDYEIPSLINHSNSHDWGEYNLSQVYGGNIVINYEVASSDLKIKISPKLRIIHEGKEGRERIQCDLMKKYGKLGDKFIIYTNINKNPNHSKNEKLIYPVYQYRNNDKGCLLFYRSNTTGTIRAWFPTTKEEITATTSSNQDCIIDTINNIDLFKAYFYMEDKEGQIATDISGATDINTGISSEKVQIIINAGKEYSLTANKDVSVQPSPSFEEMCYQFNALEIDGSSLNFTNNSASIDVTFIALADDGRKLGYEIFNIPVIQKVKTDNALTLFHDKNGAQYMQWGAYRVRLNTLFARQLVERATTGIDTILSMETQNIQEPMMGIGAYIEIVMDKYNTDIHGTNKSFKIMYGDIFKAGDHFPIYQGTLSDITQTTVKLFLPRVDNAYGNKNNLYVYAAYQKAETHFIRFVKEDNNKPATFDTTYNNGTFPGLASARVIQTFSEPMDFSGANSLYFWELFYYTPMLVAQRLLHEQNFDETNRWLKYVWSPSGYIVRGQIKNYRWNVRPFLENTSWNSDPLDSVDPDAVAQHDPMHYKVATFMRTLDLLMARGDHAYRQLERDTLNEAKMWYMQALHLLGDKPYLPLSSAWNNPRLDNAADTTIQKAYSYAITTLRQGTQTPALLLRSANTLTDLFLPQINDVMLSYWNKLELRLYNLRHNLSIDGQPLYLPMYATPADPKALLSAAVATSQGGGSLPQPFMSLWHFPHMLENARSMVAQLTQFGSTLQNIIERQDAEALNALLQNQAKELILTTLSIQDKTIEEIDAEKTVLEKSKAGAQSRFDNYSKLYDEDVNAGERQALDMRIASQSITSGLKGLHMAAAALEMVPNIYGFAVGGTRFGAIANAIAIGGGIAAEGLLIEAEKVSQSEIWRRRRQEWEIQRNNAEAEMKQIDAQLQSLTVRREAAVLQKTSLKTQQEQTQAQLAFLQRKFSNQALYNWLRGRLAAIYFQFYDLVVARCLMAEQAYRWETNDTSARFIKPGAWQGTYAGLLAGETLMLNLAQMEDAHLKQEQRALEVERTVSLAQVYQSLEGKSFTLKDKIEALLQEDKETSVGNNGNQLKLTNNTLSATLTLQDLKLKDDYPEEMQLGKTRRIKQISVSLPSLLGPYQDVQAVLSYGGDATGLAKGCKALAVSHGLNDNGQFQLDFNDGKFLPFEGIDINDKGTLTLSFPNATSKQKTILQMLTDIILHIRYTILEZ

SEQ ID NO: 3323 - protein, 939 aa, Photorhabdus luminescens
MKNIDPKLYHHTPTVSVHDNRGLAIRNISFHRATAEANTDPRITRHQYNAGGYLNQSIDPRLYDAKQTNNAVQPNFIWQHNLTGNILRTESVDAGRTITLNDIEGRPVLTISATGVRQNHLYEDNTLPGRLLAITEQAQTEEKTTERLIWAGNTPQEKEYNLVGQCTRHYDTAGLAQLNSLALTGAVLSQSQQPLVDNQDADWTGEDQSLWQQKLSSDVYTTQNKTDATGVLLTQTDAKGNIQRQAYDVAGQLKGSWLTLKGQTEQVIIKSLTYSAAGQKLREEHGNGIITEYSYEPETQRLIGITTRRPSDAKVLQDLRYQYDPVGNVINIRNDAEATRFWRNQKVIPENSYTYDSLYQLISATGREMANIGQPNNPLPSPALPADNNTYTNYTRTYSYDRGGNLMKIQHSSPATQNNYTTNITVSNYSNRAVLSTLTEDPTQVDALFDSGGHQTNLLSGQVLIWTPRGELKQVNSSAGNEWYHYDSNGTRQLKVNEQQTQNIAQQQRVTYLPGLELRTTQHGSTTTEYLQVITLGKAGRAQVRVLHWESGKPEDINNNQLRYSYDNLIGSSQLELDSEGQIISEEEYYPFGGTALWAARNQTEASYKTIRYSGKERDATGLYYYGYRYYQPWVGRWLSADPAGTIDGLNLYRMVRNNPVTQFDVQGLSPANRTEEAIIKQGSFTGMEEAVYKKMAKPQTFKRQRAIATQTEQEAHQLLTNNPGVDTSPIKDYTTDSSQINTAIRENRITSIVKDLDSSLSALQDRQIRVTYRVMTYIDNSKPSPWHSPQEGNSINVGDIVSDNAYLSTSAHRGFLNFVHKKETSETRYVKMAFLTNTGVNVAAKSKYNNENAEKIFKMDLDDSWKSFVEKLKIRANGPEAGQAEILFPRETPFEVVSMRHQGRDTYVLLQDIKPSAITHRNVRDTYTGSFRSSSTNZ

SEQ ID NO: 3324 - protein, 284 aa, Photorhabdus luminescens
TIFILTMFDYEKTIHPYEGLKMSAVFEWDPNNSQVYTKDYGTGSITLSSTQSDSFDKLGGANFTMNAESETLTLQNDSDNIPIYWPEFNRHNDGTMTDSGKGLGINVSAGTLLVDYRLNDQNHPVDRSHTVAYLGCSESTNFILKNSGSLSIKNPGTVFMFIDYVVSNKPPKLIMSGNSRFEIKQTTKIEDDVPAFIFLASEISLSESSKLTFESSNLYLGDGNFNYCNISIQDKSTVTLINNGIMQKNDIEKNKTWFKLKAGSPSLNLKSFDGIHFPLYLATZ

SEQ ID NO: 3325 - protein, 308 aa, Photorhabdus luminescens
EGYMMLFCSKNLKYFMESAKRESFTLAADTLCITPSPLSRIIYQLEQRVGCQLFERLPGRTKLTEEGMALYQELLPCYERMQRVEDNWHYRRSERLTNAGKLIIGTSGEYINKISAVIKRAVQRYHYRDIYIKNNFLVDDSARKEAIFSSLMKEDITVYVTTEHYPDNDNIIRIDGTYQVLRLAIANDILGSESHADDIISTLPLAQHNSAFLKQCDGFIPLNCLPEYQNLTLLTVPDFSNRLDLVRSGIAISLMTPNEAICSADLHKGITFLNFKSYPTPSVKYCAYTLRHKYKEPLNLLISDLIVZ

SEQ ID NO: 3326 - protein, 2526 aa, Photorhabdus luminescens
MNSPVKEIPDVLKNQCGFNCLTDISHSSFNEFHQQVSAHLSWSEAHDLYHDAQQAQKDNRLYEARILKRANPQLQNAVHLAIIAPNVELIGYNSQFSGRASQYVAPGTVSSMFSPAAYLTELYREARNLHASNSVYYLDTRRPDLKSMALSQQNMDTELSTLSLSNELLLESIKTESKLDNYTKVMEMLSTFRPSGATPYHDAYENVREVIQLQDPGLEQLNASPAIAGLMHQASLLGINASISPELFNILTEEITEGNAEELYEKNFGNIEPASLAMPEYLKRYYNLSDEELSQFIGKASNFGQQEYSHNQLITPVVNSSDGTVKVYRITREYTTNAYQVDVELFPFGGENYRLDYKFKDFWNATYLSIKLNDKRELIRTEGAPQVNIEYSANITLSTTDISQPFEIGLTRVLPNTNYAYAAAKFTVEEYNQYSFLLKLNKAIRLSRATELSPTILEGIVRSVNQQLDINTEVLGKVFLTKYYMQRYAIDAETALILCHALISQRSYNNQTSQFDRLFNTPLLNGQYFSTGDEEIDLNPGSNGDFRKTILKRAFNIDDVSLYRLLKITDHNNKDGKIKNNLKDLSNLYIGKLLAEIHQLTIDELDLLLVAVGEGETNLSAISDKQLTTLIRKLNTITGWLHIQKWSVFQLFIMTSTSYNKTLTPEIKNLLDTVYHGLQGFDKDKADLLHVMAPYIAATLQLSSENVAHSVLLWADKLKPGDGAMTAEKFWDWLNTQYTPGLSEAVEMREHIVQYCQALAQLEMVYHSTGINENAFRLFVTKPEMFGTSIGAAPTHDALSLIMLTRFADWVNALGEKASSVLAALEANTLTAEQLADAMNLDANLLLQASTQAQNHQHLPPVTQENAFSCWTSINTILQWVNVAQQLNVAPQGVSALVGLDYIQSKQKTPTYTQWENAAGILTAGLNSQQADTLHAFLDESRSAALSTYYIRQVAKPAAAIKSRDDLYQYLLIDNQVSAAIKTTRIAEAIASIQLYVNRALENVEENADSGVISRQFFIDWDKYNKRYSTWAGVSQLVYYPENYIDPTIRIGQTKMMDALLQSVSQSQLNTDTVEDAFMSYLTSFEQVANLKVISAYHDNINNDQGLTYFIGLNETDAGEYYWRSVDHSKFSDGKFAANAWSEWHKIDCPINPYRSTIRPVMYKSRLYLLWLEQKEITKQTGNSKDGYQTETDYRYELKLAHIRYDGTWNTPITFDVNEKISELKLVKNKAPGLYCAGYQGEDTLLVMFYNQQDTLDSYKTAAMQGLYIFADMASKDMTLGQSNVYRDNSYKQFDTNSVRRVNNRYAENYEIPSSVNSNNSYGRGEYNLSMVHGGDIPIIRYQASSSDLKIHISPKLRITYEGADERTRNQCNLIKKYGKLGDKFIIYTNLSVNTQWTSNKKLIYPVYQYRGNTTNNSQGRLLFYRDNQIGKVSVFLPNWGQSLYSEVTNSNNGYIIDTSNQEPLFKQYLYMEDKNNGFRIIATDVYNAVEINTAISPAKIQVTVKAGSKEKTFTADKDVSVQPSPSFDEMYYQFNTLEIEGTGLNFNNNLASIDVTFTALAEDGRKLGYESFSIPVTRKVSTDNALTLHHNENGAQYMQWQAYRTRLNTLFARQLVARATTGIDTILSMETQNIQEPVLWSDNFTATLPIYNSSLHGNSKNIKIMLGNSEKQPDQANVIYQGELTDKNQLINLSETYISIKERSNNTKPVDNKGNDSWIYLFVKYSTNPIKIGEFWFKNGTNFQGYYPKGNEKNRDPIFIENQKTEPMDFSGANSLYFWELFYYTPMLVAQRLLHEQNFDEANRWLKYVWSPSGYIVHGQIQNYQWNVRPLLEDTSWNSDPLDSVDPDAVAQHDPMHYKVSTFMRTLDLLIARGDQAYRQLERDTLNEAKMWYMQALHLLGDKPYLPLSTTWNNPRLDRAADITTQNAHASSIVALRQSTPAPLALRSANTLTDLFLPQINEVMMNYWQTLAQRVYNLRHNLSIDGQPLYLPIYATPADPKALLSAAVATSQSGGKLPESFMSLWRFPHMLENARGMVSQLIQFGSTLQNIIERQDAEALNALLQNQAAELILTNLSIQDKTIEELDVEKTVLEKSKAGAQSRFDSYSKLYDENINAGENQAMMLRASAAGLTTAVQASRLAGAAADLVPNIFGFAGGGSRWGAIAEATGYVMEFSANVMNTEADKISQSETYRRRRQEWEIQRNNAEAELKQLDSQLKSLVVRREAAVLQKTSLKTQQEQTQSQLAFLQRKFSNQALYNWLRGRLAAIYFQFYDLAVARCLMAEQAYRWEINDASASFIKPGAWQGTYAGLLAGETLMLSLTQMEDAHLKRDKRALEVERTVSLAEVYAGLPQDKGPFSLAQEIEKLVSKGSGSAGSDNNNLAFGAGTDTKTSLQASISLADLKIREDYPTSLGKIRRIKQISVTLPALLGPYQDVQAILSYGDKTGLANGCEALAVSHGMNDSGQFQLDFNDGKFLPFEGIAIDQGTLTLSFPNASMPKKGKQATMLKTLNDIILHIRYTIKZ

SEQ ID NO: 3327 - protein, 1477 aa, Photorhabdus luminescens
MQNSQTFSVAELSLPKGGGAITGMGEALTPTGPDGMAALSLPLPISAGRGYSPSLTLNYSSGAGNSPFGLGWDCNVMTIRRRTSTGVPNYDETDTFLGPEGEVLVIALNENGQADIRSESSLQGINLGEIFTVTGYRSRLESHFSWLEYWQPKTTGTTDFWLIYSPDGQVHLLGKNPQARISNPLNVSQTAQWLLEASVSSHGEQIYYQYRAEDETNCETDEFTAHPNATVQRYLQAVHYGNLTASEVFPTLNGDDPLKSGWLFCLVFDYGERKNSLSEIPPFKASSLWLCRQDRFSRYEYGFELRTRRLCRQILMFHRLQTLSGQAKGDDEPALVSRLILDYDENAVISTLVSVRRIGHEDNNTVISLPPLELAYQPFEPEQKARWQSMDVLANFNAIQRWQLLDLKGEGVPGVLYQDRNGWWYRSAQRQAGEEMNAVTWGKMQLLPITPALQDNASLMDINGDGQLDWVITGPGLRGYHSQHPDGSWTRFTPLDALPIEYSHPRAQLADLMGAGLSDLVLIGPKSVRLYANNRDGFTQGRDVVQSGDITLPLPGADARKLVAFSDVLGSGQAHLVEVSATQVTCWPNLGHGRFGQPITLPGFSQSADNFNPDRVHLADLDGSGPADLIYVHTDRLEIFKNESGNSFAKPFTLRFPDGLRFDDTCQLQVADVQGLGAVSLILSVPHMAPHHWRCDLTNAKPWLLSEMNNNMGAHHTLHYRSSSQFWLDDKAAALATGQTPVCYLPFPVHTLWQTETEDEISGNKLVTTLRYAHGAWDGREREFRGFGYVEQTDSHQLAQGNAPERTPPALTKNWYATGVPEVDNTLSAGYWRGDKQAFTGFTPRFTRWKEGKDVPATPENDDNLYWFNRALKGQLLRSELYGLDDSEQQNIPYTVTESRPQVRQLQDGTTASPVLWASVVENRSYHYERIIGDPQCNQDITLSSDQFGQPLKQVSMQYPRRNQPTTNPYPDTLPDTLFASSYDDQQQLLRLTCQQSSWHHLTGNELRVLGLPDGTRSDAFTYDAKQVPVDGLNLEALCAENSLIADDKPREYLNQQRTFYTDGKNQAPLEIPTRQALIAFTETAVLTESLLSAFDGGITPDELPGILTQAGYQQEPYLFPRTGENKVWVARQGYTDYGTEAQFWRPVAQRNTLLTGKTTLQWDTHYCVITQTQDAAGLTVLANYDWRFLTPVQLTDINDNVHLITLDALGRPVTQRFWGIENGVKTGYSSPEEKPFSPPIDINTAIALTGPLPVAQCLVYAPDSWMPLFSQETFNTLTQEEQTTLRDLRIITEDWRICALARRRWLQSQQASTPLVNLLTNSIGLPPHNLTLTPDRYDRDSGQQIHQQVAFSDGFGRLLQASVRHEAGEAWQRNQDGSLVTKMEDTKTRWAVTGRTEYDNKGQTIRTYQPYFLNDWRYVSDDSARKGAYADTHIYDPIGREIRVITAKGWLRQSQYFPWFTVSEDENDTAADVIMZ

SEQ ID NO: 3328 - protein, 916 aa, Photorhabdus luminescens
MSSYRSEIDKKTPLISVLDNRRLNVRTLEYLRTQADENSDELITLYEFNIQGFEVKSTDPRKNKNQSGPNFIRVFNLAGQVLREEGVDAGRTIILNDVEGRPVLTINATGVRQDYHYEDNILPGRLLAITEQVQAEEKMTERLIWAGNTPQEKEYNLAGQCVRHYDTAGLTQLNSLSLAGVVLSQSQQLLVDDQNADWTGEDQSLWQQKLSSDVYTTQNSTDATGALLIQTDAKGNIQRLAYDVAGQLKGCWLTLKGQAEQVIIKSLTYSAAGQKLREEHGNGVITEYSYEPETQRLIGITTRRPSDTKVLQDLRYQYDPVGNVINIRNDAEATRFWRNQKVVPENSYTYDSLYQLISATGREMANIGQQNNQLPSPALPSDNNTYTNYTRRYSYDHSGNLTQIRHSSSATQNNYTTAITISNRSNRGVLSTLTTDPNQVDTLFDAGGHQTSLLPGQTLVWTSRGELKQVNNGSGNEWYRYGSNGMRQLKVSEQPTQNTTQQQRVIYLPGLELRTTQNSTTTTEELHVITLGEAGRAQVRVLHWESGKPEGINNNQLRYSYDNLIGSSQLELDNQGQIISEEEYYPFGGTAMWAANSQTEANYKTIRYSGKERDTTGLYYYGYRYYQPWAGRWLSADPAGTIDGLNLYRMVRNNPVSLQDENGLAPERGKYTKEVNFLDELKFKLAAKNSHVVKWNEKESSYTKNKSLKVVRVGDSDPSGYLLSHEELLKGIEKSQIIYSRLEENRSLSEKSKTNLSLGSEISGYMAKTIKDTISEYTEGHRYRSNHPDFYAATDFFALMDKSEKNDYSGERKIYAAIEVKVYHDLKNKQSELHVNYALAHPYTQLSNEERALVQETEPAIAINREYNFKGVGKFLAMKAIKKSLKGQKINKISTEAINIRSAAIAKNLGMRRASZ

SEQ ID NO: 3329 - protein, 359 aa, Photorhabdus luminescens
MSKIFDFVKPGVITGDDVQKVFAIAKENSFALPAVNCVGTDSINAVLEAAAKVRSPVIIQFSNGGAAFIAGKGLKAEGQQTAILGSISGAHHVHQMAEHYGVPVILHTDHCARKLLPWIDGLLDAGEKHYAATGKPLFSSHMIDLSEESLEENIEICSQYLARMAKIDMTLEIELGCTGGEEDGVDNSHMDSSALYTQPEDVAYAYEKLNAISPRFTIAASFGNVHGVYKPGNVKLTPKILRNSQDYVSEKFNLPHNSLDFVFHGGSGSTAEEIKEAVSYGVVKMNIDTDTQWATWEGILNYYQKNEGYLQGQLGNPEGADKPNKKFYDPRVWLRAGQVSMAARLEQAFKELNAIDVLZ

SEQ ID NO: 3330 - protein, 388 aa, Photorhabdus luminescens
MSVIKMTDLDLAGKRILIRADLNVPVKDGKVTSDARIRASLPTIEAALKQGAKVMITSHLGRPTEGEYSEEFSLKPVVDYLEEKLSSPVRLEKEYLEGVDVAEGELVVLENVRFNKGEKKDDETLAKKYASLCDIYVMDAFGTAHRAQASTHGVAKFAPVACAGPLLSAELEALGKALDNPARPMVAIVGGSKVSTKLTVLDTLSKIADQLIVGGGIANTFVAAEGHNVGRSLYEDDLLPEAKKLLISCDIPVPTDVRVATEFSETAEAILKSTHDIKDDEQILDLGDESAQRLADILKNAKTILWNGPVGVFEFPNFRQGTEIVARAIADSDAFSIAGGGDTLAAIDLFGIADKISYISTGGGAFLEFVEGKKLPAVVMLEERAKQZ

SEQ ID NO: 3331 - protein, 340 aa, Photorhabdus luminescens
MTIKVAINGFGRIGRSILRALYESGRRAEIAVIAVNELADAEGIAHLLKYDSSHGRFAWDVRLNNDVLQVGDDNIRLFHQSDISMLPWQELGIDIVLDCSGIYGSRADGEAHLASGAKKVLFAHPGGNDLDATVVYGVNQHLLTAEDRIVSNASCTTNCIIPIIKLLDDQFEIESGTVTTIHASMNDQPVIDAYHKDLRRTRAASQSIIPVDTKLAAGITRIFPKFCDRFEAISVRVPTINVTAIDLSVTVKSSVTVNKINELMQKSAATSFRGIVDYTELPLVSTDFNHDPHSAIVDGTQTRVSGQHLIKTLVWCDNEWGFANRMLDTTLAMAAMGFKZ

SEQ ID NO: 3332 - protein, 264 aa, Photorhabdus luminescens
GAVGAFITVTASSVCWRNVSQFRQRDIRAVIRPGTIEEVQEIVRIFNRFKTHAGLHAISTGRNWGLGSAQPATDGVVTIDLQRLNVLREIDCSSGWAVIESGLTQIELARFLVGTDRMLNVTASSGHTSVVGNALDRGVGLRRQRIDDLAGLEVVLPDGEVVKVGWWPDESRKTAVNPYGLGPALLHLFTQSNLGIVTAAVIKLLPRPERQCILRLTFPRENLQAAIAELRRWVAQELVSGVLKIYDTISTESYGGRCTTRSQZ

SEQ ID NO: 3333 - protein, 198 aa, Photorhabdus luminescens
MSRRGRPPNFDRDIALKRAMEVFWSKGYEGTQLVDLTAAMDINPPSFYAAFGSKKNAFCKAVDLYIKTIGVQSMQALNEAKTARSGLRAMLESTINIASSHQAGGCLLVLGVVNNLTENKEVWAYLRDARTKTLDMIRVRLEQGITDGDLPPNTNVDVLASYFLGLTQTISFQARDGVPRERLRRLIEPAMAAIPGNZ

SEQ ID NO: 3334 - protein, 665 aa, Photorhabdus luminescens
MTTRKTLANAIRFLSMDAVQKAKSGHPGAPMGMADIAEVLWRDYLNHNPTDPHWVDRDRFVLSNGHGSMLIYSLLHLTGYDVSVDDLKNFRQLHSKTPGHPEYGYTPGVETTTGPLGQGIANAVGFAIAERTLAAQFNRPGHEIVDHNTYVFMGDGCMMEGISHEVCSLAGTLKLGKLVAFYDDNGISIDGHVEGWFTDDTASRFEAYGWHVIRGVDGHNADSVKAAIEEARKVTDKPSLLMCKTIIGFGAPTKAGTHDSHGAPLGDAEIAATREALGWNYPAFEIPAEIYSEWDAKEAGNVKQAAWNEKFAAYEKAYPELAAEFKRRTSGELPANWEVESKAFIEQLQKNPANIASRKASQNALEAFGKVLPEFMGGSADLAPSNLTMWSGSNPLNEDQAGNYIHYGVREFGMSAIMNGIALHGGFVPYGATFLMFVEYARNAVRMAALMKIRSIFVYTHDSIGLGEDGPTHQPVEQLASLRVTPNLSTWRPCDQVESAVAWKYAIDRKAGPSALIFSRQNLAQQERTAEQLANIEKGAYILKDCQGQPELILIATGSEIELAVSAYHQLTEEGRQVRVVSMPSTDAFDKQDAAYREAVLPAAVSARVAVEAGIADYWFKYVGMNGAIVGMDTFGESAPADQLFKTFGFTVENVVAKAKALLKZ

SEQ ID NO: 3335 - protein, 349 aa, Photorhabdus luminescens
FYEELKMSAAFKWDPKNSQEFTKDYGTQVITFTPTDQQAQPYPFDKLGGANFIMNAEGETLTLQNDSNKIPIYWPEFKRNNDGTMTDSGKGMQFIISSGTLEVSYQSEDRNNTVIYLGCAESTSFDFKDSGILNIINPGTVFFFIDYVISNELKPPKLTMSGNSKFKIIQKTKIQPKAPAFIFLASDISLHGSSELTFESNKIFLGDGNINYCNINIQDNSKVTLINDGIVPKNNIDKTKTKFNLRSGTPILNLSSLTGINYPINLDNIEYPKGLFNFITTEGKNKGKIIIDISNPDSKETNLSDKIFSKELIAINGKIADKNSFNISYKIAIRQGKQVITTTISLRAZ

SEQ ID NO: 3336 - protein, 285 aa, Photorhabdus luminescens
TYTQWISRCIAAARERIPGSIDNDVTGVRECSQQRSNLKDDGYTDNYLINSQGTFMSNIRKRPNNITPQLIYMWEKSNEPWGAKDRQSKFIYANPAFYQLLNLPEDFDISGLSTDELPSPIAEYTEEYCRQDQKVMQTMKTVTSLETHLFGGNKVKQTYRCSKYPLCDENGNCIGITFHMSKAQNFSTAYYHEKSPPAALEFTPPNDILTQTEWEVLFLALRSPDEESISKELMISTEDAVNHIQSIYQKFNLPLHIKLKDFCKANKFDLYIPERFVTIGSQELZ

SEQ ID NO: 3337 - protein, 249 aa, Photorhabdus luminescens
MSTAITRQVVLDTETTGMNKLGVHYEGHKIIEIGAVEVINRRLTGRHFHVYIQPDRLVDPEAFEVHGISDEFLQDKPLFADIADEFIEFIRGAELIIHNAPFDIGFIDYEFGKLNRDIPPTADFCKITDSLQLARGLFPGKRNNLDALCDRYDIDNSKRTLHGALLDAEILSDVYLIMTGGQTSLAFSMEGEIASGANVSEIQRITRPQMALKVIYATDEELAAHESRLDLVEKKGGSCLWRMNLGQSZ

SEQ ID NO: 3338 - protein, 238 aa, Photorhabdus luminescens
MKSAHTIQNINPPASWADLPWGEYYRAALERQLQPWWPKIFGFHLLKVGNLSAEIDSNGCPIFNQINVGREGKNMQVISDPYHLPFEEKSVDACLLSHMLAYSADPHRLLREVDRVMIDDGWLIISGFNSLSLLGLGKLVPGLWRHQPYCSRMFSMMRQLDWLSLLNYEVVYRDSFQVLPWRNETGFSNRHLSVLGCVSLIIARKRTLPLTLNQRKVTRLKPKLGNAVGVTKCYRKRZ

SEQ ID NO: 3339 - protein, 251 aa, Photorhabdus luminescens
MELISIPALSDNYIWLLCDENRHVVIVDPAESQPVLDTLESRGWIPDAILLTHHHHDHVGGVPGIIDRFPELLVYGPAETQSKGATIIVCGGDSINFGHFSFQIIDVPGHTLGHIAFYQAPYLFCGDTLFSGGCGRLFEGTAEQMYTSIGKIAELPDDTLICCAHEYTISNMKFAHAVLPNQTISEYQQKVIRMRENNQPTIPTTLQTEKKINIFLKCDDIDLQRNIGITPNSQPLSAVFHQLRRQKDQFZ

SEQ ID NO: 3340 - protein, 454 aa, Photorhabdus luminescens
MKTKAILFASVLLVGCQSGPDWSTTAGQRAQNSSSTSLKTGKIATDNTNQLAAYWGEGDSGAQHELWGYIRDELKMKIPDNYRVREQRNYYLKNKSYLHDVTLRAEPYMYWIVRQIKQRDMPMELVLVPIVESAFNPHATSHAKAAGLWQIIPDTGRNYGLTQDKWYDARRDVAASTTAALNLLQRLNKMFNGDWLLAIAAYNSGEGRVMRAIKENQIKGKPTDFWSLSLPRETALYVPKVLALSDVIRNSDKYGITLPKSNNQRALAQIDVGQQITLSQAAELAGMSLTSIKAYNPGYKRGVTSPNGPHYIMLPKAKVNQFKNSLANKTVLSNIRQEVAKNNHRLSKQSQYKVRSGDTLSAIAKRFNISTRELQRLNNLKTARLLKIGQLLRVNNDNAIIYRVRQGDSIASIAKRHGINIKDLMNWNDGIKTTDIKPGIELTLYINEYYDEAZ

SEQ ID NO: 3341 - protein, 324 aa, Photorhabdus luminescens
TKVLLPQLRTIIMTTSSTMRTPIKLPPMPSESEASKTYKSADMARSYLEGDDLIFTDKDGFNRALRDGFFLLKAPSYMDFEHGDRFAYHFFEPATEGDLRPYTGFKSYTFSNSYEGYFDREHDQWEHFRLERENWHLMPSEVATLGHHMAHIGICVLRSVLTYVGIPRRDWELITNGISEGLRNQMLSFNHFRSEKAIRGSKFHRDSGWVTVLRSTERGLLAYINDELLAIEPVPGYLIINFGSSIEVLTENLTPNVRANIHGVARTERNRQRDRMSYVMFLVSDLAGNVYKYGPNGPINVQSVKEFVIQEASRTYDDDNDALZ

SEQ ID NO: 3342 - protein, 402 aa, Photorhabdus luminescens
GYFSWRKIMDKEFRKLILASSGNSFTLYLEMIISFTLITYHWNGGAIYSSLYTISYAASLLFLTPYVSSFVDENIKPKKYIIIISLLCGVITIFQYNIDDMNIYILYSFIKNILRLFLGPSNFKILKNISTNQFEKNFSYWQVLFQIYKMLAPLFLGFILIYYSTKQILILISMLYFISAVLYIFVSEPLINVNRKKNKISLINYFNIMKDNKILFSFIVISTLTCFGYLSDSLIALSFMAQGLNGSHYSFAMCLSGISGVLIGLVFGKYKINISLNTMLSSFFLWGTGYLLIGIANQFNDLFPDKINLFFIFLAMAIIGMGSSMNNIIITIYMQKFATNDNSAKIFGLTSISVGFSMFIGPLIGSTISYLFSISIVFFTTFIGIFLTIIGVILINRKFTSZ

SEQ ID NO: 3343 - protein, 392 aa, Photorhabdus luminescens
KCRGYNIRINEGIKMNTIELKIRVLCSGLKYDKNVIYEYSKRNFIPKRRAYGTSDSSKLETTHSVPQEVILEDGTIIACNYNESSDYDLIYKNGDFYIKSGNILFKVIFPIKPDIYGMELLDGSRVEEYVTVYGDTTLGFFSPGHCYYFNDGRQCKFCSLGEARNSLSDHKKSIRPSKVIEVMNVIEANNISRYKRILINGGTTRNYDIGFEMHKQLLVSLKPFCKKNNLNSHLISMPPRDLNKIKGISEFVDSWAISLEIFNPKLFDQICPGKSQDYGRNNLLEAYLAAVSELGEGNVYVGFVAGLEPLNDLVKGMEFFSKNGIVPAVAVFHPDHGSEYQNHPRPIFEDIYKTYVEMHKLYQKYGFKPFIIGSGRNSLDTEAYYGEKRNDZ

SEQ ID NO: 3344 - protein, 284 aa, Photorhabdus luminescens
CHMRYVFSNEVSNYLEIHLHKLREEIRRIWLAKLSTIHIGYDNKYHGETVEIDIILNNIIYEHLDKSELKVTIISEDDSESQSVNIKDKVSLLIDPIDGTHNLLMGYPAYTTSIAVYKNNRYIMGWVYDIPRDIIYKASLGEGSYIQSIYTSKRIYTSPSFQLNDLRVSFHRARNNQYTEVQNKIINEANKVRISSCSSLDICLIASGVLHAFLDLSLMGHERCVDIAAAKLILEESGGYIMTRDGNSYNILSPTDSLFFEKKAIIAVSSKSAGDTILELMRVZ

SEQ ID NO: 3345 - protein, 362 aa, Photorhabdus luminescens
FLYIGIRKTRGINKIIHMGNAMERIKIISRHHCWRTLKGTKTNNFQEYLNQINNGCQLQETIFHLRDAEEMLMDLSNLSSPMSRLSSTEIIHIWDELVDYLNINKLTSDMGNLVNGYGLDPELALYGTELCELKINREKILSEIINKGITNKLELIYSRGLDKSVKLKDAPQKTIDLYDEFRYEYSKSINLFSLETCPTLNIENIYQDHYLWDKIFTIAKNKLFIISGGIPLALSYHAKTLDKNIYFCEIHRENDSGLLHKRKLFNEIYPKFKGKENESWLIIDKSYTGGSIQLAYKMLVNLVGYKSQIYKVSFSPKTLGAFSSSDYAIYAGRLFDVKKTIAYLTAEDWHKKLIYLGDNVTZ

SEQ ID NO: 3346 - protein, 366 aa, Photorhabdus luminescens
MSIFNFISKIEDPRSDINKKHELMDVIFLAFSAVLCGASGWKSIQEFGELQSEWLKQYTHFTHGIPRRHCIANIIKMIEQDALVEAFYAWINQRRVRAGKSLIAIDGKTLRGTCKGTLFEALHVVSAYDVESGVALYHQAAESKGQEGPVARQLIELLALDGAIVTMDALHCQKETLALITQRGGDFIVGLKGNQKTLHEWVKSYFASHYESDELVEFTQKNSGHGRTEFRHVMQIRAVLPEVLRRQWPSIQSVIEVVSERSVKGQPPHRNSRWYVSSLPLEAEIVAKAIRKHGSVENELHWVLDVTFREDAISLKDPDGAAQMALFNRIALSVIKQNTSIKDSQAAKRRRAIWSGEFRSQLIFDZ

SEQ ID NO: 3347 - protein, 349 aa, Photorhabdus luminescens
NMDIINVKREITVIINKRFNDTDLYTCYLSGSVIEGFATPKSDYDVYVILEGDLEIECEEIFIPSDIGMLEVTIISLKEIKEIMKIINNGGSNSDWYKLHLSHRILTGESIIKSNNFNKLKGDINKTKLCEILKTKAKNFGEKCFSDGIGNILNNDLISAAFNFERTVNSAMDYILASSGNTSTLVKWRYQNAMKMFGKGHPITSIYLMICSKFNVINDISTIDYINSVAKMWQLTLDYCQGKDIFGYNVSFAKKRIANTSDILLSDKNNKPIIKNLWYRVLCKDGKLILFAKKALCEINSDAYKVWLVIDNEKTEFEVVSELEKLGITNENANFYISEFERLGALTKZ

SEQ ID NO: 3348 - protein, 323 aa, Photorhabdus luminescens
KVFLLLYLRAIIMKTSSTMRAPIKLPLMPSEITAAETYKSANMVRSRLEGDKLVFTDEDDFDRAIRHGFFLLEVPPHIDFEYGDRLAYHFFEPVTEGDLRPYTGFKSCTFSNGFEGYFDRKHDQWENLYIERAHWNLIPTEVATLGHHMAHMGTCILRSVLNHVGIPRSDWELVTGGLSEGRGHQMLGFNHYRSEKATRGSKFHRDIGWITILRATERGLLAYIDDELLAIDPVPGHLIINFGSSIEVLTENLTKNVRANIHGVVRTERNGQRDRMSYAMFLDNSLAGDLYKYGPKGPIKVQSVKEFAVQEISRSYDDNNALZ

SEQ ID NO: 3349 - protein, 391 aa, Photorhabdus luminescens
MNKKAQYSSTLEQSTKYTFLFILSVTVFFVGATEFMLSSMLTPLAVAFGTTAIGASWLVSSYAFSYALAAPIFGYFSDRINRSRLLMISLLFFAADGLAITLAPTLNIAITLRIFGGIASAVIIPTVFALIADIIPYNRQAGAMGIVMLGMTFGIAFGPALAGILTDLINWQAPFLFSSLGSVVTFIIGIYCLPSKTAPLQPTNQRLVWFRQWSVVRPIIAKGAWNGTGVSAFLLSGEVLRQRYGFGPTEIGLTVATFGVGLGLGNLSVGWLRKLCDREEVILVLVSLLLTGVISVFMLVPLTLLGSLGCLIFWGAALGVGAPASTVVLATRAGPNKGMVLAFAETFNNLGILCLVPLATIGLVAGGSSSAMAVLFVGLVIGLTLTILDCZ

SEQ ID NO: 3350 - protein, 462 aa, Photorhabdus luminescens
MDVSESLTTAIRPNFSNKKGLIILAADIALLLILLNTLPFGEKANAGLALMIFVGVLWLTEAIHVTITALCIPILAVGMGLMNTGDALKSFANPIIFLFFGGFALATALHIQGLDRLIANRLLMIARGRLSVAVMLLFGVTAGLSMWISNTATAAMMLPLVLGILSNLDARSERHTFVFVLLGVAYSASIGGLGTLVGSPPNAIAAAQLGIDFFNWMKFGVPLVVILLPMMVGVMYLMLRPNLNHKFDMKLEKLDWTGKRLMTMLIFLLTVFCWIFSTVISSALGGVKDLDTIIAVSAAVLIGITGVASWSQIQNNTEWGVLILFGGGLTLSAILKNSGASEIMANGMAATFGASHWFVIIVAVAAFIIFLTEFTSNTASAALLVPIFATVAEALGMPIMTLTLIIGFGASCAFMLPVATPPNAIVFSSGHIKQTEMVRVGIVLNIACIAIISLFAWLFWLZ

SEQ ID NO: 3351 - protein, 301 aa, Photorhabdus luminescens
PYIEVFTVLQFYSFTVLQFYSFTVLQFYSFTVLQFYSFTVLQFYSFTVLQFYSLIMIGEIMKDKIMSFSVNKDLDVHSKSFDAFISYMENSNDFWIIKDNESRFVYANDIMLYYSGLPKGFNIEGKLDSECPAPWAEFEDVIQANDKNVMTSQKTIPVLNTFTYGGRQKIIQPFMVDITPLMKDGTCIGIVGHGKKLEIYSMYHFENNIHPESLTFGKPTDLFTDREFDIVFFALQSLSAKDIARKLSITYRTVQSRLHIIYQKIGINSLSQLKEYCRGKGYDNYAPTRFINPNPYIPLVZ

SEQ ID NO: 3352 - protein, 291 aa, Photorhabdus luminescens
HHCHYYVIRVLPSRTLCSAQNSLSNAKGDFTGYLTWRLSQFYSSIMIGEIMKDDTMSFSVNKDLDVYSKSFDTFISYMENSNDVWVIKDKEHRFIYANDTMIHYSGLPKDFNIEGRLDGECPAPWSEFENIIQANDNNVMTSQKTIPVLHTFTYVGKEKIIQPFLVNVTPLMKDGECIGIVSHGKKLQIYSMYHFENNIHPESLTVGKPTDLFTDREFDIVFFALQSLSAKDIARKLGITYRTVQSRLQFIYQKIGINSLSQLKEYCRGKGYDNYAPTRFINPNPYIPLAZ

SEQ ID NO: 3353 - protein, 255 aa, Photorhabdus luminescens
TLSRFYSSIMIGEIMKDNTMSFSVNKDLDVHSKSFDAFISYMENCNEFWYIKDKESRFIYMNDYGLHHSGLPKGFNVEGKLDSECPVYWSEIADIIQSNDRRVMEEKKVIPTLITFMYGGRDKIIQPFMADVTPLIKDGESIGVVGRAKKLEIFSMYHMEINKPPESLSFGNPTEIFTDREFDIVFFALQSLSAKDIVRKLSITYRTVQSKLQFIYQKIGINSLSQLKEYCRDKGYDNYAPTRFINTNPYIPLAZ

SEQ ID NO: 3354 - protein, 288 aa, Photorhabdus luminescens
RVYAIRVLSNRTLCSNQNALNSAKSSYVGYLTWKLSQFYSLIMIGEIMKDKTMSFSVNKDLDVHSKSFDAFISYMENSNDLWIIKDSESRFVYANDVALYYSDLPKGFNIEGRLDSECPAPWSEVADIIQANDKNVMTSQKTIPVLNTFIYGGKEKMIQPFLADLTPLIKDGKCIGVVGHGKKLEIYSMYHFENNRHPDSLTFGTPTDLFTDREFDIVFFALQSLSAKDIARKLSITYRTVQSRLQFIYQKIGINSLSQLKEYCRDKGYDNYAPTRFINPNPYIPLAZ

SEQ ID NO: 3355 - protein, 258 aa, Photorhabdus luminescens
PYMEIIPVLPFNHIGEIMKDNTMSFSVNKDLDVHSKSFDAFISYMENSNDFWIIKDSESRFVYANDATLYYSGLPKGFNIEGRLDIECPGPWVDFVDVIQANDKNVMTSQKTIPVLNTFIYGGREKIIQPFLVDITPLMKDGKCIGIVGHGKKLEIYSMYHFENNIHPDSLTFGKPTDLFTDREFDIVFFALQSLSAKDIARKLSITYRTVQSRLHIIYQKIGINSLSQLKEYCRGKGYDNYAPTRFINPNPYIPLAZ

SEQ ID NO: 3356 - protein, 272 aa, Photorhabdus luminescens
VPKTHKYNYPLCCKSDNFTWEFLQFNHIGEIMKDNTMSFSVNKDLDVHSKSFDAFISYMENSNDIWAIKDNEHRFIYANDTMIYYSGLPKGFNIEGRLDGECPAPWSEFENIIQASCDVVMTSQKTIPVLNTLTYGGKQKMIQPFMLNVTPLMKDGKCIGVVGHGKKLEIYSMYHFENNIQPDSLTFGKPTDLFTDREFDIVFFALQSLSAKDIARKLSITYRTVQSRLHIIYQKIGINSLSQLKEYCRGKGYDNYAPTRFINTNPYIPLVZ

SEQ ID NO: 3357 - protein, 363 aa, Photorhabdus luminescens
GLKMNEKSENSFIWYPDRDQTYTEEYDNKTIPPIYSFNKEIGTTFTMDAGENTLTLSFDKNDRPSDYDIKWPILSPLQTAKDNPGNKTLSKTIKISSGNLIISGKKEKPVNFYLNREISGKHGHRIELQNSSTFKIENAGIVRISNHINTKLKESTVAMSGKSQLTVEVVGTVEKTQENNEVLKTNISLNCDFFITEYSNAMLKSHFIDIYNSNIILQDNAQMSITSQKLRIKTDLDEKGQPLFDTNFTLKAGATSLNLNSIDGIHFPLNIHRENYPKGVFNFMAEGKENTGKVVIDVAPKDANAYGLNTLLRKNFTAINGKVVETGDQMKYFDFNYGKDIRNGNQVGTITISLRNPHLKLSZ

SEQ ID NO: 3358 - protein, 258 aa, Photorhabdus luminescens
PYIEVIPVLPFNHIGEIMKDNTMSFSVNKDLDVHSKSFDAFISYMENSNDFWAIKDNEHRFVYANDIMLYYSGLPKGFSIEGRLVSECPAPWSELEDIVHASDGNVMTTQKTIPVLNTFTYGGREKIIQPFLVDVTPLMKDGECIGVVGHGRKLEIYSMYHFENNRHPESLSFGNPTEIFTDREFDIVFFALQSLSAKDIARKLSITYRTVQSRLHVIYQKIGINSLSQLKEYCRGKGYDNYAPTRFINPNPFIPLAZ

SEQ ID NO: 3359 - protein, 322 aa, Photorhabdus luminescens
KNIAGVRDMITTLLPDLLTLIPLYLWHNNEPHRYYHYAIRVLPSRTLCSGQNSLSSAKGDFTGYLTWRLSQFYSSIMIGEIMKDNTMSFSVNKDLDVHSKSFDAFISYMENSNDFWAIKDREHRFVYANDTMLYYSGLPKGFSIEGRLDGECPAPWSEFENIIQASCDVVMTSQKTIPVLNTLTYGGKQKMIQPFLTNVTPLMKDGECIGIVGHGKKLEIYSMYHFENNIHPESLTFGKPTDLFTDREFDIVFFALQSLSAKDIARKLGITYRTVQSRLQFIYQKIGINSLSQLKEYCRGKGYDNYAPTRFINPNPYITLAZ

SEQ ID NO: 3360 - protein, 399 aa, Photorhabdus luminescens
LMRTMSALFLLFGTLFTAGGYGATFLISAYFRSQGGSDIDTGTTLSVALVGTLIGVPLVGWFAGQLEASRLAALAALAMSCGYFLLGGFSGELSYIPRIAAFLIGLGWGMFYISGPMALSERVTDADRGHWFTRFSAFQMAGICGSPILLAAAVEQAGVPIQTTFLFVGVIGILASLLLATFGIREPHGQRELSLRPWVRKITKIAASSAIRPIVMVGLGGCVFSGMMSFQSSLVEGTQANASTFFAVHAATVVVSRLLLARRLSMMPRIPLVIALMLFLIMGILALLGIPVNPMFQVLAAMLTGIGYGLVYPVIQTWAVNDSALENRHAALTWFVVAYFVGIFGFPAIGGWILVGAGKTLFILTLAAIASLELGVALLGGRWFCRIKDRLTAQNEARZ

SEQ ID NO: 3361 - protein, 394 aa, Photorhabdus luminescens
MYNLTRPIYLDNNATTPLDPDVLQTMMPYFTSAYGNAASNHHAFGWKAMEAVDNARKLISTSINATSHSDIIFTSGSTESNNLAIAGLQHRGKRGHVITSTIEHKAVLDCCSRLEAMGTEVTYLPPQSDGIVSPDLISRAIRDDTYLVSIMAANNEIGSIQKIEEIGAICKEHDIPLHTDATQALGKIKFDVQRMNISLASFSAHKIYGPKGVGALYIDSRNKNITLAPLIVGGGHERGLRSGTLNVPGIVGFGRAVELSVKNLPDESMRLRYLRDLLRSYIIENVADVRINGHLTECLPGLLNVSFNGLDADSLLLELSEVALSSGSACTSANRAPSHVLKAIGVSDTQAQASVRFGLGRFNNEDEIRYVCLRLEKAVNKLRSMVPKPFGVLZ

SEQ ID NO: 3362 - protein, 258 aa, Photorhabdus luminescens
KLMDFCGHPYTYDPSWKRILMKMNQRETNVSILAGNSRVYLNKDSEIVVEAQLKAFEAALMFAKRSQDECGQLPRISVAFDHHGIFRLQFLINNLTNSQKRNPRLSHLHASIRNIFLPVAEKYQIPLSEIRVIHEDSARQHLVHILASGEIPEIITRRMVSKNLADGKPPTSDAAYEEPTQKLTCAAITKEYFEKAAGDHKGSDTILEVFFEDCAWSRALAYVRGLQLSHMLGVSTAIRLNLVNEEGEVSQGDVITAZ

SEQ ID NO: 3363 - protein, 407 aa, Photorhabdus luminescens
YLINYLLSLTFYFFQAIERSAVTQSFFNTDQLIVFSNAIRATHRTGFDLTCRGTYCQISNSRIFSFTRTMRNYRRVTCVFCHFNRCQCFSERTNLVEFNQNGVSNAFLNTFFQDLSIGNKQVITNQLDFFAQHFCLVSEAFPVRFIQAIFNRNNRIFSGQIFEVMSELLRSESFTFTFQFVITGFWVVEFRSSTIHSQSDIFAQNIACLFYRFFNSSQRSSVRFQVRRITTFVTNRSTHAFCFQNFSQVMENFRTDTNRLFQRFCSNRLNHKFLDINVVIRVLTTIDDVHHRQRHREFTRSAIQFSNVLVQRHTFRCCCGFRISQRNRQNRISTELRFIFSTIQVDHDFVDVSLIFRILADNCLCNRAIYCINSFQYTFTHKTGFVTVTQFQRFARTGRCTRGCSRZ

SEQ ID NO: 3364 - protein, 434 aa, Photorhabdus luminescens
MSKIVKVIGREIIDSRGNPTVEAEVHLEGGFVGLAAAPSGASTGSREALELRDGDKSRFMGKGVLKAVDAVNGPIAQAVIGQDAKDQANIDKIMIDLDGTENKSQFGANAILAVSLANAKAAAAAKGMPLYEHIAELNGTPGKFSMPLPMMNIINGGEHADNNVDIQEFMIQPIGAKTLKEAVRIGSEVFHNLAKVLKAKGMSTAVGDEGGYAPNLESNAAALAAIKEAVEQAGYVLGKDVTLAMDCAASEFYNPETGNYELKGEGKTFTSQEFTHYLEDLTRKYPIVSIEDGLNESDWEGFAYQTKVLGEKIQLVGDDLFVTNTKILKEGIEKGIANSILIKFNQIGSLTETLAAIKMAKDAGYTAVISHRSGETEDATIADLAVGTAAGQIKTGSMSRSDRVAKYNQLIRIEEALGNRAPFYGLKEVKGQAZ

SEQ ID NO: 3365 - protein, 546 aa, Photorhabdus luminescens
MKTNYIFVTGGVVSSLGKGIAAASLAAILEARGLNVTIMKLDPYINVDPGTMSPIQHGEVFVTEDGAETDLDLGHYERFIRTKMTRRNNFTTGRVYSEVLRKERRGDYLGATVQVIPHITNEIKDRIISGGEGHDVVLVEVGGTVGDIESLPFLEAIRQMAVEVGREHTLYLHLTLVPYLAAAGEVKTKPTQHSVKELLSIGIQPDILICRSDRVIPANERAKIALFCNVPEKAVISLKDVDSIYKIPGLLKSQGLDDYICKRFSLDCPEANLSEWEQVIYEEANPSGEVTIGMVGKYVELPDAYKSVIEALKHGGLKNRLTVNIKLLDSQDVETRGVELLKGLDAILVPGGFGGRGVEGKIMTARYARENNIPYLGICLGMQVALIEFSRHVAGLEKASSTEFEPDCRLPVVGLITEWRDEDGNLEVRSEESDLGGTMRVGGQPCHLTKDSLVRTLYGADTIVERHRHRYEVNNLLLKRIEDAGLRVAGRSVDNKLVEIIEIPDHPWFVACQFHPEFTSTPRDGHPLFTGFVKAAGKYQKGQLKZ

SEQ ID NO: 3366 - protein, 260 aa, Photorhabdus luminescens
MTGIKRLLGIMAQLRHPQQGCPWDKEQTFKTIAPYTLEETYEVIDAIERGDFSDLKEELGDLLFQVVFYAEMGKEQQLFDFDDICNAISDKLERRHPHIFGQQQDISSDVAISGWEKRKAQERAQKDLHSVLDDIPASLPALMKAYKIQKRCAAVGFDWDTLGPVLDKVYEEIDEVMDEAHQAVVDQQHLEEEIGDLLFAVVNLSRHLGYKPEIALQKACNKFENRFREIEKLILKQGHTLEAATLEEMEKMWQQVKKQZ

SEQ ID NO: 3367 - protein, 744 aa, Photorhabdus luminescens
MVAVRSAHLTPAGEFAVNRWIASLNIANLQLGEKLAETWRYCHEKAQNHPDSELLLWRGVEMVEILSTLSMDSDSMRAALLFPLMDAKLLGDETVTEAFGSAITNLVKGVMEMDAIRQLKATHHDSICSVQVDNVRRMLLAMVEDFRCVIIKLAERIAHLREVKEATEDERVLAAKECSNIYAPLANRLGIGQLKWELEDYCFRYLHPDEYKKIAKLLHERRIDREQYIDYFVNTLRKHMLKEGVTTEIYGRPKHIYSIWRKMQKKSLAFDELFDVRAVRIVVERLQDCYAALGIVHTHYRHLPDEFDDYVANPKPNGYQSIHTVVLGPGGKTLEIQIRTRQMHEDAELGIAAHWKYKEGAAAGSRVGYEGRIAWLRKLIAWQEEMADSGEMLDEVRSQVFDDRVYVFTPKGDVVDLPTGSTPLDFAYHIHSDVGHRCIGAKISGRIVPFSYQLQMGDQIEIITQKHPNPSRDWLNPNLGYVTTSRGRAKIHNWFRKQDRDKNIIAGRQMLDNELEHLDISLKEAEKLLIARYNVHTLDEVLAGIGVGDIRINQLVNFLQSKLKKTTAEDADREALRNLESKSHPQRSSAKDDGRIVVEGVGNLMHHIARCCQPIPGDEIVGFITRGRGISIHWVDCEQLAELQANAPERVVDAVWGESYSSGYSLIVRVVANDRSGLLRDITTILANEKVNVLGVSSRSDVKQQIATIDMNIEIYNLQVLGRILAKINQLPDVIEAKRLHGNZ

SEQ ID NO: 3368 - protein, 220 aa, Photorhabdus luminescens
MKNKLISTQQAMEHFYDGMTIMAGGFIGVGTPPHLVTALLNSGVKNLTLIVNDTGRIDTGIGPLVVNNRVKKVITSHIGTNPETGRKMLAGEIEVELVPLGTLIERIRCGGAGLGGFLTPTGVGTIVENGKQKITLNGTDYLLELPLRADLALIQAHLADYHGNLTYQLSARNFNPVIALAADITLAEPDRLVEVGEITPDCVITPGALIDYIVYPGENZ

SEQ ID NO: 3369 - protein, 439 aa, Photorhabdus luminescens
MVQFYSPNRRTVNRHIITVTADNLDAQGQGVARHQGKTIFVAGLLPGEQAQVQLTEEKRQFAKAKLVKRLSDSPYRVNPRCPHFGVCGGCQQQHVAPDLQRESKASVLEHLIRRETGVTVSAKPVILGPEYGYRRRARLGLHYQIKQRQLVIGFRQNQSNELVAIKECPVLRPELEQLLQPLSQCLNSLKAVKRLGHVELVLADNGPLMILRHLDPLKREDKEKLGTFSVQHNVAVYLAADETSLESLNELPEPWYQVDGLKLVFSPRDFIQVNDQVNQQMVAQAIEWLDLQPNDNVLDLFCGMGNFTLPIGRIVQSVVGVEGVATLVANGQYNAKINNLDNISFCHENLEADIHHQPWAKLGFNKVLLDPARAGAVGVMSHIVELVPEKVVYVSCNPTTLARDSKILLEAGYQIISVRMLDMFPHTGHLESMALFSRZ

SEQ ID NO: 3370 - protein, 776 aa, Photorhabdus luminescens
MTKYSLRIRMMSLILVPILLVGMFFSISFLCYHYRELENQIVRSGISIIEPLSIASEIGINLHNRESVNSLITRLHRRNSEIVRAIAIFNDDNQLFDISNYKYNSAQLQISPDMPLPTTLTKTEVKNSIILRMPIISEHHLSQNQPHSDTPSLRPIGYIAIDLDLRSAHLQQYKEIVIFILLLLICLGWASLFAYHLVRKITKPISDIVSTVDRIRQGQLNSRVSGKYFGELDMLKNGINAMAKSLSSYKEEMQNDIDQATSDLRETMEQFEIQNVELAIAKKRAQDAARIKTEFLANMSHELRTPLNGVIGFTRQTLKTPLTIQQTEYLYIIERSANHLLNIINDILDFSRLEADKLVLENVPFLLQDTIDEVMVLLTLSAKSKNIQLTHHVDPQIPNLVVGDPTRLQQIFTNIIGNAIKFTDQGSVEIKINLLQQKHHKINLEITVSDTGIGISPEQQPHLFQAFHQANASISRHYGGTGLGLVITRKLIQEMGGNISFTSEPKKGSVFRFDLWLGKDDFILTGSVVPQKTLIHPPRLPMTVMAVDDNPANLKLIGSLLDEIVEKTVLCNSGEEALQSAASHHFDLILMDIHMPGMDGICTSNHIHQLPQHYSTPIIAVTAYTCRPKSDTHSPFEDFLTKPLDEHRLRVVLDRYVKTPKSQHINWPLALQQATGKEPLAIDMLQMLVDLLPTIKTITEKVLSGETVENYQQQIHKLHGSCCYSGVPQLKALCQLIEQQLQQGVQLTDIEPELLELTDEIDHVLTAAQKILSRGZ

SEQ ID NO: 3371 - protein, 509 aa, Photorhabdus luminescens
MSGIDFSQKLNYQRKYRQYHVDPNDEEQVIRQFESDRGRIMNSAAIRRLQQKTQVFPLENNAAVRSRLTHSLEVQQVGRYISKTIINELKTRNLLADYGLDKRLLSFESLIEMACLMHDIGNPPFGHFGEAAIKDWFAKKLDLNFSLENIKREDRCEISALRLCGDVKKDRFRRQLRKDLCQFEGNAQAIRMVHSLLKLNLTYAQLGCILKYTCPAFRLEEIPNQFNYLMKKPGFYWSEEHFVCELRRELKMGEFCRFPLTYIMEAADDISYCIADLDDAVEKAIFSVDTLMGYLEQEWQENGGHRAGDLFDLTVRKAYKGTHGNELRRSQQDQFFMYLRVYITGKLVPYTARRFIDHLPAVFEGSFNQALLEDKSEEHRLLRTLKNIACKRVFNHPEIEKLELQGYRIINGLLDFYYPLLKMPRQDFVELNQNNFHKDYFMETRLLHKLSTKHRLAYGEAVEKIVATDQAEKDLLEFYYRARLIQDYISGMTDNYVYEEYRKFIVCTZ

SEQ ID NO: 3372 - protein, 234 aa, Photorhabdus luminescens
MKVGVIGAMEQEVTLLRNQIEDRQTLSRGGCEIYTGKLNGVEIALLKSGIGKVSAAIGTTLLLEHCQPDVIINTGSAGGLDPKLQIGDIVVSREVRYHDTDVTAFGYEPGQMAQCPAAFVADDQLIDLAEKCIHSLNLNAVRGLICSGDAFINGAEPLARIRATFPQVTAVEMEAAAIGHVCHQYNTPFVVVRAISDVADKESHISFDEFLAVAARQSTLMVNAMLATLSKDKZ

SEQ ID NO: 3373 - protein, 304 aa, Photorhabdus luminescens
GIYYRHALINIFGRVYGRYISCFKERTSMKWIKSTGSIGLSLLLFLSSFSHSLYAAPLRVISLSPSTTELAYAAGLGDNLIAASAYSDYPPQARKLEQVANWQGINLERIITLKPELILAWRGGNPQRPLEQLAAFGIKIFYSDPTTTEQIAQDLERLAEYSPHPEQAKKSATELRQRFANLQQQYATTTPKPAFLQFGTYPLFTTSGQTLQSEVLSICGGRNIFANSPVPWPQVSREQVLIRKPEIIVISGGQEQVKLIENFWHPQLRAKVITLHEDWFHRAGPRIILAAEQLCQQLNDNGSZ

SEQ ID NO: 3374 - protein, 278 aa, Photorhabdus luminescens
LVTLLNVFQSNHYGVPMRKMLPLMLAVTLTGCTAHSKQADIDSYTSKKINEIIENQVKPGNKENPGEIIKDVSYQFLGTPYAANKLIGSPTEPEKLVIDFNGLDCFTFLDYVESLRKSNDQSDFVKNLIQTRYIDGKIRFLQRKHFLTDWSTREKLNAKDVTDEISSSYIAITKSLNKKADGSEYIPGLGVTKRDIKYIPGDKINDAVIKNLKTGDYIGIYTHLAGLDVTHTGIFIMTDHGPMLRNASSLAANKKVVDSPFLDYVKNKPGIIVLRALZ

SEQ ID NO: 3375 - protein, 428 aa, Photorhabdus luminescens
MSQSDILYSQAKQLIPGGVNSPVRAFNGVGGTPLFIKHADGAYLYDVDGKAYIDYVGSWGPMVLGHNHSAIRNAVIKAAEQGLSFGAPTAAEVEMAQLVTELVPSMDMVRMVNSGTEATMSAIRLARGYTHRDKIIKFEGCYHGHADCLLVKAGSGALTIGQPNSPGVPVDFVKHTLTCTYNDLSSVREAFEQYPQEIACIIVEPVAGNMNCVPPQPEFLPGLRALCDEFGALLIIDEVMTGFRVALSGAQSYYDVEPDITCLGKIIGGGMPVGAFGGRYEVMEKLAPIGPVYQAGTLSGNPIAMAAGLACLKEVSQPGVHQRLTELTDNLAAGLTKSAKAANIPLVVNHVGGMFGIFFTDAETVTCYQDVMNCDIERFKHFFHLMLDEGVYLAPSAFEAGFMSIAHTDEDIQRTVNAAARCFAKLKZ

SEQ ID NO: 3376 - protein, 2011 aa, Photorhabdus luminescens
YMRNAARIINESLEQGITLFVTDNRLQYETRRSSIPPELLSEWKQHKQELIDFLNQLDAEEQTQTHHFLQDIQRDGKAEHYPLSFAQQRLWFIDQLDGGSRQYNCMGDFRLRESINIEAFEAAVKALLERHEVLRTHFKIINNEPRQFIAADYDLPITDHDLSALSETEKNDQVKQISKEEENLIFNLNTDLMLRVRLIKLAEDDYLIIYTIHHIAFDGWSMAIFLHEFFTLYKAYCQGKANPLPPLRIQYADYAQWQQSWLQGDVLKKQLTYWQNQLAGISPVHRVPLDNPRPEKQNIEGRLHLQRISAHLTQAIRALCTKHNVTLFMFLETAFTVLLSRYSNEKDILVGTAIAGRQHPDIEPLIGFFVNSLVIRTDLSGQPTFSELLKQNSRTILDAYEHQALPFEMLVEKLSPERSLNYNPVFQIMFAVQNNQRDAILGQDDIIELGDNLLRTTRFDLEIHVFEEEQTDELSIVWISNTSLFDSNTIERFIANYATLLSGIVEVMTDDSVNKEPSIHELPLLSEAEKHILLHELNGPQNHYPQGRCFHELFEEQVALNPEKTALVFGEETLSYQAVNVQANQLAHYLIEQGIQPDTLVAICLPRSLQTVIALLGILKAGGAYVPLDASYPQARLQYMLEHSGAEVILTETPLVDKLPISQQRVICLDAETVHLYVQNLPTGNIVHRPVPLTENHLAYVIYTSGSTGRPKGAMLEHKGWVNLAQAQAALFGADADIRGLQFASWSFDAAVLEMAMTLAYGATLYLIAETHRRSPEWLDEMVEKYHISHAVLPPALLPHLDFNKWRTVSTLLLAGEAVAPHIAAQWSQGRKLFNVYGPTECTSIVTSALLTANKRVTIGKPLPNTVMRILNADGNLLPLGAVGELHIGGMQLARGYRNAPDITEKQFIRDPFSTNPADRLYCTGDLVRWTLEGELEFIGRRDSQIKIRSHRIELGEIESVLAGQEILSNAAVIVDGHNSEERKLIAYVCPSTNWLAEKAADFNADYIESWTEIFNGQYRREITENIVTDTTDESDNNSDFYGWINTYTEQPIALDQLEEWRVGTMRRIESLHPSSLLEIGCGSGLLLYRYAGRCESVLATDISAEVLARHQKILQQRGWSHVELRRGDALNLGTITPDQFDTVVINSVVQYFPNIQYLEKVITQLLPAVKSGGKILLGDIRNLDLLTAHVTAIEKNRLNGQRISVGTLANRIQQRLQKEKEFLLSPTYFAQLPTRYPEIGRVDILVKRGVGDNEMLRYRYEVILHKCDKNAELCCNLPLTWCDFNSIEDLYHVLETGKFDTFGVSGIPNARIKDDFDLAEGLRHWPSNQIIFLPKDVGGFSPEAAEQVLALESLLQYAEQCGYQCELTWSQQQLDLLDVIFSRGELPQVQARLGYSQTHLANYPQLPAISGELAELLESALKKQLPDYMVPSFYIPLERIPLNLNNKVDKKALPIPNENDLRRQAYIAPRDEIEEKLCQLWQEHLKINQIGIYDNFFSLGGHSLLAVKITASIRNTLTNNFNMHELFANPTIVQIASVIRHSHKHEISAPKTTHNISDHNAFDGKMPISYCQKMYWYFVQEALLEDSFHVPITLLMAGELDRSALEKSLNTILARHESLRFKFYQENGQIFMQPDNSMKINLQVIEALPRGIERDQIIIEINKLWQEKLRTPFDVYNGPLIKTFLLPVSETITVLLIDVHHIISDGWSVNIIMNEFKQLYTAYSQGQENTLPPVAMQYSGYVYDLQEIHVTEVAKKQIKFWQQQFADVNSERDFPVSFRKHLASKYRSHAHHIKIPDSLDKAVLQYCETHKITPYMLFMALFHTCLFMYSGESQLIVTSPKADRTRIESHQTIGLFLGDLIVKSNINQEMSLQEIIKQVSQSIHRAIENANIHMSVVIDVVGEKARDNIFNVLFNYLDAQNFYDFIDMSKDEKLSLPNLEVEVIDTEIIPFESLGMNFLYMPQNIKCELHYNPELYTEAVIDRMAIYYERLLNVIVSGQEKESISQFYDZ

SEQ ID NO: 3377 - protein, 1579 aa, Photorhabdus luminescens
YMKNAAQIINEALNQGITLFVIDNKLKYKTSRDSIPSELLNEWKQYKQELIDFLKQIDSEEDSDTHRLQGIPRYDRAEHYPLSFAQQRLWLIDQLTEGSPQYNCTGDFRLRESLNLNAFEAAIATLLERHESLRTYFKIIDNEPRQVIATAYDLPITIHDLSTLAEFEQQQQVKQLGEQEWKQAVNLSTDLMLRIRLLKLADDDYFILYTIHHIACDGWSLAIFISELLTLYRAYCQGEGNPLPPLPVQYTDYSQWQRDWLQGDILEKQLDYWQNQLSAISPLHRFPLDNPRPEKQNFEGNVHPQRISKALTQEIRALCAKHEVTLFMFLETAFAVLLSRYSSEKDILVGMPLAGRRHRDTEPLIGFFVNSLVIRTDLSGQPTFSELLKQNSRTILDAYAHQDLPFEMLVEKISPERNLNYNPIFQIMFAVQNNQRDTTLEQDSIVTSKERSLLTTRFDLEVHIYEEDEGELSIGWISDTSLFRNATINRLIANYEILLTNIVDVMKHHAGISEPSVHDLPLLADAERNTLLHEWSGPQIPYPTGKCFHELFEDQVSQHPEKNALILGDDTLSYQSLNEQANQLAHYLLEQGIIPGTLVAFCIPRSLQAVVALLGILKAGGAYVPLDPSYPKARLQYMLDHSEVEFILTETHLVEKLPISQQKVICLDTETVQSQLQHMPTDNITERPLPLTENHLAYVIYTSGSTGKPKGVMLEHRGWVNLAFSQADLFGIDSHCRGLQFASWSFDAMILEMSMTLAYGATLYLISETQRRSPELLDEVVEKHQITHAVLPPALLPHLNFNKWRSVSTLLLAGEAVPPQIAVRWSQNRKLFNVYGPTECTSIVTTALLTDEKITIGKPLPNVVMRILDPEGNLAPMGVIGELYIGGIQLARGYRNAPEITARQFIRDPFSPHSTDGGENRLYRTGDLVRWTPNGQLEFIGRVDSQVKIRSHRIELGEIETVLSGHDALSSAVVVAYGQDEDKKLIAYVCPSTEWLGEKAVEFNASSVENWTEIFDDQYRQTTTKPTTKPTTNSTQKESTQKGDVVASDSDFGGWMNSYTEQPIALEQMEEWLTGIMHRIKALHPHRLLEIGCGTGLLLYRYAEQCESVVATDISAEVLNRHQHILQQRGWSHVQLRRGDALNLGTLSADEFDTVVINSVIQYFPNVQYLEKVLEQLIPAVEAGGKILLGDIRNLDLLTAHATAIEQSHLNGQRIQVGTLANRVQRRLQQEPEFLLSPTYFAQLPERYPEIGRVDILVKRGIGDNEMLRYRYDVILHKRGEKTKSCNELFSNWHHFDSFDSLRNLLQMGTEDILGVSGIPNARIKDDLTLAEGLRHWSANQMITPPANVGSFSPQALQQVQEFESLLQYAEQCGYQCGITWSQQQPDLLDVIFSRGELPPVQARADYNQTHLANYPQISAISGELSELLESALKQQLPEYMVPSLYIPLERMPLTLNNKVDKKALPIPNEDDLRRQNYVAPRNEIEIKIGQLWKRLLNVSQVGIYDNFFTLGGHSLQATRLISSIRNELEIEVPLRSVFEHPTLEQLSQVVTIHLIKEKRKHFQAGKETTQELLKGDIZ

SEQ ID NO: 3378 - protein, 1178 aa, Photorhabdus luminescens
FDVIFSRKYMKNAVQIVNEALNQGITLFVADNRLQYETNRDSIPTELFNEWKNYKQELIDFLSQIDAEEEIQTYQLQNIQRDGNAEHYPLSFAQQRLWFIDQLTEGSPQYNCPGYLRLREQLNFNAFKAAVKTLLERHEALRTHIKVIDNEPRQVITHCYDLPITRHDLTAFSETEQESQIKRFSKEEDNLVFNLSTDLMLRIRLIKLAENDYVIIYTIHHIACDSWSIEIFVNELITLYRAYSKGKIAPLPPLKIQYTDYAQWQRNWLQGDILKKQLDYWQTQLSGISPLHRFPLDNPRPEKQSFEGRLNEQRISKDLTQEIRVLCHQHEVTLFMFLETAFAVLLSRYSNEKDILVGTPLAGRRHHDIEPLIGFFVNSLVIRTDLSGQPTFSELLKQNSRTILDAYAHQDLPFQMLVEKMSPGRNLNYNPIFQIAFTLENTQCDTVLAQDNNIEFEERLLLKVRFDLEIHIYEEEEGGLSLLWVYDSSLFNNMTIERLLANYETLLANIVSVMKPCIGSDLIYKEPSVHDIPLLAEAEIQTLLHEWNGPQDHIQHGGCFHELFEQQAARYPEKIAVIFDGNSLSYQELNKQANQLAHYLIEQKIKPETLVALCIPRSIRAVVALLGIIKAGGAYLPLDPSYPKSRLQYMLEHSEAEFILTETNLIEKLPISQQKVICLDTETIQSQLQHMPADNIAERPFPLTENNLAYVIYTSGSTGKPKGVMLEHKGWVNLALSQAGLFGVDSYSRGLQFASWSFDAMILEISMTLAYGAALYLISETQQHSPEYLDELVDKHQITHAVLPPALLPYLDFNKWRSVSTLLLAGEAVPPQIAVRWSQGRKLFNVYGPTECTAIVTSGLLTDDKITIGKPLPNTVIRILDPSGNLVPVGVAGELCIGGIQLARGYLNSPETNATKFMTDLTGKSQSQRLYRTGDLARWLPDGSVEFIDRIDSQVKIRGFRIELGEIETVLVGHDALSSAAVMTYGNDKRLIAYVCPTKDWLDKKGLKFNTDNVSQSSDIKAELSELLESALKKQLPEYMVPSLYIPLERMPLTLNNKVGKKALPIPNENDFRQQGYVAPRNEVERKISQLWQEVLGVSQVGIYDNFFVLGGHSLQATRLISLIRNDLNIEILLSSVFEHPTLERLARIATIHQVKEKRKHFQAGQETTQKLLEGDIZ

SEQ ID NO: 3379 - protein, 220 aa, Photorhabdus luminescens
MNTQQVIAHRVALELQDGDVINLGIGIPTQVPNYLPDNIHITLQSENGILGLGPITEVHPNLVNAGGKPCGILPGAAIFDSALSFALIRGGHVNTCVLGGLQVDQHANLASWMVPGKMVLGMGGAMDLVTGARKVIIAMEHCTKDGSAKILKQCTLPLTAINKVNMIVTELGVFCFEQGQLILKEHAPNVTLETLREKTEAEFSIAHDLKIMPIPIQKKZ

SEQ ID NO: 3380 - protein, 444 aa, Photorhabdus luminescens
RGYARMVMEVINVIYNQHEVGAMSFDPSKNLGLFQYDPSFIAKGIELSPLKMPLSNKIYSFPELDYHTFKGLPGLIADSLPDDFGNAVLNAWVAAQGKSPNDITPLQRLQYTGKRGMGALEYAPATKMRNLTSSKQVEIGSLVSIAQEILNSRGNFTAELINNGQEDREAMMSLLSVGMSAGGARPKAVLAFNEDFTQVRSGQVKVPDGFIHYLMKFDGVSEHNKNQETFGDPLGFGAMEYVYHLMAKDCGIDMMPCRLLHEGNRRHFITQRFDRLGNKKIHVQTLNGLAHVDYKKPGSFSYAELFFVARQLKLSAKAAEQLLRRMCFNIIARNHDDHAKNFAFILKGKKWDLAPAYDLAYSYKPDSRWVSSHWMSLNGKRDNFTRQDFYSLEKLSPLFTKKMVNGIIEETIEKVSAWSKVAADFGVPKSLIDLVDTNLRLNIZ

SEQ ID NO: 3381 - protein, 559 aa, Photorhabdus luminescens
IMAIGYFLLVGDKTTCGGQIITGDHTMTFNGRATAREGDKVTCGKHPGSYTIVGGVSDVFDMGRKLAGTLDSVSTCPCRARFINSEMDSYEKQEQPNNRATSPVNMATQNFSSPVEEARNVQPAPPVTKEPPIPVFAKSCLRGKGCTDAGTEAEPADNFGRVAIYQVPSSPTPVTPQKPEPPPQGEKQPSEPDKPQDKKLPWYKRWFRGGEDKAEAAAAAVAATARSAVAEGETLVMRYIGGGAISAGRWLAAPNPVTVGLMGLFYSPKLNEGEEDYLDPSRLRQIAEQYGKAPTRVRFRWIRDEKSGRMTVQGYHVSPEGGLDKVPVRMMTLNRTTGNYEFWEPGEYRPTILWTPNEQEFKVPAHTGNEEQPFIPSQITVLPIPEKVGSDIESLPMPEEKDFRDYILILPVPNMPPVYVYLSKPPVKPLEVGEYQDLAGRSRNDGLDIDHIPSKAALKLFLKNKLGKAATDKDIDKILNSGVSIAIPHRVHRGYSETYKGRNTKAKQVKDASDIRVAVDSNFDAQVPGLREEGYTDDQLNKAREELHQLNKEQGWYKZ

SEQ ID NO: 3382 - protein, 819 aa, Photorhabdus luminescens
MSGEDRQPIGRKGKKWVSRRKRSIKRRYLLDDDNGYEDEDYDDEEDQLMTKKGMYSRPPKKKWRWFWLLFKIFIIFAVLLAAYGVYLDAKIRDRIDGRVWELPAAVYGRMVNLEPGMNYSKKEMVHLLEGMQYRQVTKITRPGEFSVRGETIEMLRRPFDFPDSKEGQIHALLTFSDNRLAGIENLENQRQFGFFRLDPKLITMLQSPNGEQRLFVPRSGFPDLLVNTLLATEDRHFYQHDGIRILSIGRAALANLTAGRTVQGGSTLTQQLVRNLFLTNERTLVRKANEAYMAVLMDYRYSKDRILELYLNEVFLGQSGDGEIRGFPLASLYYFGRPVDELSLDQQALLVGMVKGASLYNPWRNPKLTLQRRNVVLKLLQNQQIIDEDLYKLLSARPLGVKPKGGVITPQPAFMQLVRKELQDKLGDRVNDLSGVKIFTTLDPVSQDAAENAVEEGIASLRKTRKIADLEGAMVIVDRISGEIRAMVGGSQPQYAGFNRAMMARRSIGSLAKPSTYLAALSEPDQFRLNTWLSDEPLAVKQPNSKVWEPRNYDRRFRGRVLLIDGLANSLNIPTVNLGLAVGLDHVSNTLIRLGVPEEVIQQVPAMLLGSLSLTPLEVAQEYQTMTSGGNRATLSALRSVIAEDGTVIYQSYPQAERAVPAQAAYLTLYGMQQVVANGTSRSLNAKFGRYNLAGKTGTTNDLRDSWFAGIDGKEVVIAWVGRDNNGPTNLTGATGALNVYRRYLENQTPLMLNNIPPEGIVDMAVNQDGSFSCSGSGWRTLPVWTYDPQSLCQQTAVSAPVQQQEEAPGWLREMFGQZ

SEQ ID NO: 3383 - protein, 830 aa, Photorhabdus luminescens
MLQCRRLKVNFLWYGVFVSLLPVYEIVEPVLSALKNSQQVLLHAPAGAGKSTALPLEILKKAAFSGRIIMLEPRRIAARSVANRLAAQLNENIGQTVGYRMRSETKVSVTTRLEVVTEGILTRMLQQDPMLTGVSLVILDEFHERSLQADLALALLLDVQAGLRDDLRILIMSATLDNQRLCSLLPDAPVIISEGRSFPVTRHYCPLSAHQPFEQSIATVVLRLLQQEQGSVLLFLPGSGEIQRVFGLLSGRVAEDTDLCPLYGALSLAEQQKAIEPSPSGRRKVVLATNIAETSLTIEGIRLVIDSGLERTTRFEPKNGLTRLITQRISQASMTQRAGRAGRLEAGVCWHLFSQEQAERAVEHSEPEILNADLSSLWLSLLQWGCHDISQLHWLDIPPAAALAVAKSLLLQLGAISNSGQLTSRGSKMAESGSDPRLAAMLCAGLEQGADMLATAAMLTAILEEPPRDGQPDITYWVEQRQAHWLRRAKQLVRNMGDHFGEPVGGFAAMLLAQGFPDRIAKNRDKGGRFQLSNGLGTIIDDEETLSGESWLVAPSLLQNSRNPDARILLACPLDIERLIQQQPNLFSEQSVVEWDDNKGTLQAWKRLQCGSLTVKAQRLAKPSDEQLQQALLNWLRSEGLHELNWSPAAVQLCIRIQCAAKWLPEMLWPPVNNDALMASLDDWLMPFLTGVRDLKGLKQIDLLPALENLLDWQQQQCLDNELPIYYTVPTGSRIAIRYFSDKPPVLSVRIQEMYGEWQSPSLAKGRVTLVLELLSPAQRPLQITQDLAAFWQGSYREVQKEMKGRYPKHLWPDDPANTVPTRRTKKYSZ

SEQ ID NO: 3384 - protein, 281 aa, Photorhabdus luminescens
RVYLFLSIIMSSKAYSFDNMKLSFVEGGDFYVGSVFGAQNYESHSNVTLNSFYIMKNEVTYSEYKEVYEWAILNGYDFDDGCNGAHYEDCLPPEQEEGRHPVTSIKWLDTILFSNALSEKLKLTPVYFQKGNKTIRKKDKNLEIFINTNANGYRLPTLNEWHVAARGGKPALRLGRYGYYHSGSNDSKKVAWYPEFNTSNFGTQVVGKLSPNDLDLYDMSGNVSEWVYDSYELGTVKLYYFCGGSYLSHANSLSSCDNHSSGYIMPDVGFRLVRSYLNEKZ

SEQ ID NO: 3385 - protein, 224 aa, Photorhabdus luminescens
HVFSESQSQIDYSISAYCGTQPNHQRACELTTLHSREVTLAFPRLENKGFLVSSGEKRNKSYTLPGMSLPSPEELFSAGTINNINNKLDLPHKESSLPHSYSGIQIHRDELGRLAPSSFSLPFIDDLKYITSDLREKLREIAKPAYENRRLDLEQMQSIIMKLCQSHYIRIDVLGILLNRSAKNLRQRHIKPLLNKQNLMMAFPQTPNHPNQGYTVKDVLQKDZ

SEQ ID NO: 3386 - protein, 301 aa, Photorhabdus luminescens
LVRYYMTIDIDIDQLLKAEASFMLGTLTLESNIIEVMKYESGTLLITQDSPFYPKNYKWPDQLHDNGIISIGDKELAVTKVYTAGLIDGLLYIDQEITKQTTSPEKIMPAHYLPDLHGISERDLIGKTVTLSVNDETRYKVSAAHSMAHFMSLAVNKATHHIWSKVYDTDDLGNYNLDKAAIYQSSITELKSVDIYRFGKSIKKKGFDKNILIKNLDKINREVNNTLNNWLSQGAEITIEYKSKEINDTRLWKSTIDSKVVTIPCGGTHINNINEVKDVNVEIKIGESADFIQVTTYCRVZ

SEQ ID NO: 3387 - protein, 501 aa, Photorhabdus luminescens
METKDLIVIGGGINGAGIAADAAGRGLSVLLLEAQDLAKATSSSSSKLIHGGLRYLEHYEFRLVSEALAEREVLLNLAPHIAFPMRFRLPHQPHLRPAWMIRIGLFLYDNLGKRVSLPGSKGLKFGANSVLKPELVRGFEYSDCWVDDARLVVLNAQEVKKRGGEVRTRTKVTRAWREQEGWMVEAEDLRTGKTYTWRAKGLVNATGPWVKEFFDDGLKLKSPYGIRLIKGSHIVVPKVHDEPQAYILQNEDHRIVFVIPWMDEFSIIGTTDVEYQGDPKEAKIDDQEINYLLRVYNDHFKKQLNRDDIVWTYSGVRPLCDDESDSPQAITRDYTLDIHDEQGKAPLLSVFGGKLTTYRKLAEHATEKLMQYYPTAGKAWTRNGQLPGGNLEGCDRDGYARLLRKRYNWLPEGVAVRYARTYGSNSELILQGANNLTDLGESFGHGLYETELRYLVDNEWVVELDDAIWRRTKLGMWLKEEQKQRIAAWLAENAKPRTEIZ

SEQ ID NO: 3388 - protein, 253 aa, Photorhabdus luminescens
VKQTQRHDAIVELVRLQGYVSTEELVEHFNVSPQTIRRDLNDLADKNKIQRHHGGAALPSSSVNTAYHDRKIMWSEEKARIAQRVASHIPDGAALFIDIGTTPEAVAHALLNHKGLRIVTNNLNVATLLMTKEDFRLILAGGEIRSRDGGIIGEATLDFISQFRLDYGILGISGIDMDGSLLEFDYHEVRIKRAIIENSRCVMLVTDHSKFGRNAMVNLGNMNLIDHLFTDQLPPPSIHKVIEQHNVQLELCZ

SEQ ID NO: 3389 - protein, 283 aa, Photorhabdus luminescens
MIRVIAISNPRLAQAFIDYMATHQVHLTMRPSHDGQHVELWLEDDTKLTLVQQELEQFTRDPLNERYQAASWQSGDVNHPLKYHNNLNWQYLSRQAGPLTLTILLLNIVVYLWMQFAGDYQVMSWLAWPNDSQHMELWRWVTHGLLHFSLLHIIFNLMWWWYLGGQTEKHLGTGKLFVIMIVSAVFSGWGQSLFSGSHFGGLSGVVYALIGYVWLTGERAPERGIGVPRGLMAFSLFWLIVGYFDAFGLSIANAAHFSGLIIGLLMALWDNRHTFKNNNRHFZ

SEQ ID NO: 3390 - protein, 335 aa, Photorhabdus luminescens
MDYQNIFKLTMQEKQDLFLALNKIDYDPTGSDLYIHLVKSAMMSFLPTRVISALNKQRTSINPRPYIILKNVPTDCEIFFSPSPNQYTPSAKSGNISENLLTGIASLIGEPYSMLFEGKELINNLIPTHESKNEYTGLGFDVELDFHIENAALKHLEQYNISPLGLLLTGVRHDPGGPLTRISDSRLSIAQLKKDDIETLSSPLYSIKLPYRWRQSTLVGKEETHPVPLIAENHILPNISAVFYPGMITASTAKAEIALEKFYASVKRNAVGICIIPGDLVYIDNRLTLHSRDKFTPTFDNIGTPLRWLQRVFISPNLWNHRYLNQIEHRVFSIZ

SEQ ID NO: 3391 - protein, 228 aa, Photorhabdus luminescens
MLTMVGYCWLCHQPLWFPHHGVCSFCNKRLKRLANMCPCCALPSELPSLPCGRCLKKPPLWENMIAITDYCPPLSGLIRRYKYHRTPQLASVLARLFLLHWQQGYRDGRWYKPNILLSVPLHRHRRWKRGFDQSVLMAKQLSEWLQCDYQQSFLQRTHATLPQRNLSAARRKINLRKAFQLCGSVTGQHVAILDDVITTGATMTEISRLLIRAGARSVQVWAICRTLZ

SEQ ID NO: 3392 - protein, 403 aa, Photorhabdus luminescens
VTYMKENIDKLLSNIAIMEPPLGLQDKLALARQENRKLTIKLGFDPTAPDLHLGHAVVLQKLKDFQDEGHRIVVIIGDFTAGIGDPTGRNKLRPPLTPEQINKNSQTYINQLAKVINIENIEIRKNSEWFNNMPFSNVIKLISKITLAQIMHRDDFKTRFESKAPVHLHEIIYPILQGYDSVMIDADIELGGTDQLFNNLVGRTLQEAYEKKGQIVITMPLLEGLDGIEKMSKSKNNYIGLTDNANDMYGKVMSIPDSVIINYLTLATDMEAEKQSAIVSQLELGLNPMKIKKDIAYNIVKRYHDDISAKEATEHFERVVQKRTPEEADHDVLILPKGSYITLLDLCSVALPAISRSELRRLIRSGAVRVDKSKEDDEIKNIEVIPGTLIWIGKRYKFRIGSZ

SEQ ID NO: 3393 - protein, 262 aa, Photorhabdus luminescens
MADLFWQTSDEGSRDLVLLHGWGLNAEVWRSIEMRCAPHFRLHLVDLPGYGRSQKYGPMNLADMADEVWRYAPENALWLGWSLGGLVASRIALDHQDKVAGLITVASSPHFSAESDWPGIKPEVLHDFEHQLSKDFQRTVERFLALQTLGTDSARQDARLLKSVVLAQPMPSVEVLHVGLEILRTEDLRQPLAELAIPFLRIYGYLDGLVPRKIINILDEKWPRSVSAMMRHAAHAPFISHPDEFVGLLTEFASREVLQGRZ

SEQ ID NO: 3394 - protein, 771 aa, Photorhabdus luminescens
MKALTIGLIGNPNAGKTTLFNQLTGARQRVGNWAGVTVERKVGRFTTADHKIELVDLPGTYSLTTISEQTSLDEQIACHYILSGDADMLINVVDAANLERNLYLTLQLLELGIPCIVALNMLDIADSQHIQIDIAELEQRLGCPVIPMVSTRATGVNELKRAIDHHKQNFGQSLIHYPDCLLQEVETLSGVISDNFHAQQRRWLALQMLEGDIYSLERSGLATSMLIKSKERLQQQQHEEPELVIADARYQSINTLCMAVIDTQKAMPNKLTQAIDRIILNRWLGVPIFLAVMYLMFVLAINIGGALQPIFDSGSVAIFIHGVQWLGHTLSFPEWLTIFLAQGLGGGINTVLPLVPQIGMMYLFLSFLEDSGYMARAAFVMDRLMQVLGLPGKSFVPLIVGFGCNVPSIMGARTLDAPRERLITIMMAPFMSCGARLAIFAVFTAAFFGKNGATIVFSLYILGIVVAILTGLMLKYTIMRGEASPFVMELPVYHIPHLKTLLLQTWQRLKGFVIRAGKVIVIASMFIGALNSFSFSGKTVDSINQSALASVSKIITPVLQPIGVHSDNWQATVGLITGAMAKEVVVGTLNTLYTAENIANEPFNADEFNLFAELKDAVGETWDSLKETFTLSVLTNPIEASKGDGEMDSSSMGTMSAKFGSSISAYSYLIFVLLYVPCVSVMGAIARETSRGWMTFSILWGLNVAYSISALFYQVVTFSQHPQSSLIIILTVVLFNALVFCFLRRARSRVTMKLISNPGNSCHCSSGNCHZ

SEQ ID NO: 3395 - protein, 777 aa, Photorhabdus luminescens
MNESLSQIIASELQAQPQQVLSAISLLDEGNTVPFIARYRKEVTGGLDDTQLRQLETRLSYLRELSDRRQTILKSIDEQGKLTPELTEAINGTQSKTELEDLYLPYKPKRRTRGQIAIEAGLEPLADSLWQDPQQEPEQVATTFVDTDKGVADTKAALDGARYILMERFAEDAALLAKVRDYLWKNAHLVAKVVAGKEEEGAKFRDYFDHHEPIAQVPSHRALAMFRGRNESILQLSLNADPQFDESPKESYCEQIITQHLHLRLNNAPADNWRKAVVNWTWRVKVLLHLETELMSTLREKAEDEAIKVFARNLQDLLMAAPAGMRATMGLDPGLRTGVKVAVIDATGKLIATDTIYPHTGQTAKAAASVAALCLKHQVELVAIGNGTASRETERFFADVQTQFPEIKAQKVIVSEAGASVYSASELAAQEFPDLDVSLRGAVSIARRLQDPLAELVKIDPKSIGVGQYQHDVSQSQLAKKLDAVVEDCVNAVGVDLNTASVPLLTRVAGLTRMIAQNIINWRDENGRFNNRAQLLKVNRLGPKAFEQCAGFLRINHGDNPLDASTVHPEAYPVVEKILAATEQKLQELMGNPISLRGLQPQDFTTEQFGVPTVTDILKELEKPGRDPRPEFKTATFAEGVETMNDLHPGMVLEGAVTNVTNFGAFVDIGVHQDGLVHISSLSNRFVEDPHTVVKAGDIVKVKVLEVDLNRKRIALTMRLDEQPGETHSRRSNNNNPQTDRRPEQNNRNRNTSGSSTSAGNSAMSDALAAAFGKKRZ

SEQ ID NO: 3396 - protein, 240 aa, Photorhabdus luminescens
MQVDNKILVVDDDMRLRTLLERYLTEQGFQVRSAANAEQMDRLLTRESVSLIVLDLMLPGEDGLSVCQRLRNQSNPVPIIMVTARGEEVDRIVGLEIGADDYIPKPFNPRELLARIRAVLRRQANKLLGLPAEDDAIINFGKFSLNLSTREMFQGDEHIQLTSGEFAVLKVLVSYPGVPLSRNKLMNLARGREYSTMKRSIDVLVSRLRRVIEEDPTHPRYIQTIWGLGYVFVPDGIRVZ

SEQ ID NO: 3397 - protein, 444 aa, Photorhabdus luminescens
MRLLRFSPRSTFTHTLFLIMAMLFISLVTSYLVVVNFVIMPSLQQFNKVLAYEVRTLMAEKLKLEDGSFLVISPVVRREIYQELGITLYSESDAEIQGLCWARRYDFLSEKMGEYLGGKADLRLEINTDSPILWLNSYLAPDIWVRVPLTEIEQNQFSPIFRYTLAILLLVFGCIWLYIRFQNRPLLEMEYAARQTGKGIMMPAVREAGSLEVRAAIRAFNQMSAGIKLLESDRTILIAGVSHDLRTPLTRIRLATEMMSKEDTYLSESINKDIEECNAIIEQFIDYLRTGQEMPMEFCELNSILKEVISAENGYEQDIENHLSLHPITVNANPISIKRALANLLVNANRYGNGWIKVSSGQTNKFAWFQVEDNGAGIKQEDLPRLFQPFVRGERARSSSGTGLGLAIVQRIIDAHDGKIEMGTSLRGGLSIRVCIPVVEDNFZ

SEQ ID NO: 3398 - protein, 347 aa, Photorhabdus luminescens
MKLMRTTVTGIMAAAFSLTTLPVFAATSLTGAGATFPAPVYAKWADSYQKETGNKVNYQGIGSSGGVKQILANTVDFGASDAPLSDEKLAADGLFQFPTVIGGVVLAVNIPGIKSGELTLDGKTLGDIYLGKVKKWNDPAITQLNPGVKLPEQDIAVIRRADGSGTSFVFTRYLSKVNKAWQEKVGVGSTVSWPIGLGGKGNDGIAAFVQRLTGSIGYVEYAYAKQNHLAYTKLVSANGNIVSPTEESFSAAAKKAEWHKTFAQDLTNQQGENVWPMTSTTFVLVHQQQKDAVKGAEILKFFDWAYEKGSKQANDLDYATLPKEVIEQVRAAWKTQIKDSNGKALYZ

SEQ ID NO: 3399 - protein, 319 aa, Photorhabdus luminescens
MAEQKTAMKAPSKNGDIIFSALVRLAALITLFLLGGIIISLIIASWPSIQQFGISFLWQKTWDAPAEQFGALIPIYGTLVTSLIALIIAVPVSFGIALFLTELAPNWLKRPLGIAIELLAAIPSIVYGMWGLFVFAPLFATYFQQPAGNLLASMPIVGELFSGPAFGIGILAAGVILAIMIIPYITSVMRDVFEQTPVMMKESAYGIGCTTWEVIWHIVLPYTRNGVIGGVMLGLGRALGETMAVTFIIGNTYQLDSFSLFMPGNSITSALANEFAEAESGLHTAALMELGLILFVITFIVLALSKLMIMRLAKNEGRZ

SEQ ID NO: 3400 - protein, 310 aa, Photorhabdus luminescens
KDHQMLNVFFSILPIFLLITLGFLSKIYIKDVSSFWNFSDKFVYYLFFPCLLILDISEANFSGSDNFYPIVSTISSTIIIAIIIFIGRFLFNTTPDLFTSIFQGGVRYNSYVFIALSQSLFGSEGVALSGFFVAYMIIITNIMSVLVMNHYGHGSKKNLGGAILALAKNPLIIGAIIGVLLNYFNIHITGPIRQLFIYLSNAATPLSLMSVGAGLIISMHIKKILSISYATILKLVLMPLITILIIKYLGVSGASANIAILYSAVPCAGNAYILAKQMGGDHEAMASIITWTTLLSIITVTLILGNMKLZ

SEQ ID NO: 3401 - protein, 295 aa, Photorhabdus luminescens
MATIDRQKPIDANVRSCKQAWRRQKNRIALLLSMATMLFGLFWLVWILFSTVTKGFDGMSLALFTEMTPPPNTEGGGLANAIVGSGLLILWATVIGTPLGIMAGIYLAEYGRRSWLAEVIRFINDILLSAPSIVVGLFVYMVVVTKMQHFSGWAGVIALALLQVPIVIRTTENMLKLVPDSLREAAYALGTPKWKMISAITLKASVSGIITGVLLAIARIAGETAPLLFTSLSNQFWSTDLSQPIANLPVTIFKFAMSPFSEWQQLAWAGVLLITLCVLLINIVARVLFAKKKHZ

SEQ ID NO: 3402 - protein, 259 aa, Photorhabdus luminescens
MNIVNDIASSKIQVHNLNFYYGKFHALKNITLNIAKNKVTAFIGPSGCGKSTLLRTFNKMYELYGEQRAEGKILLDGKNILTDKQDVALLRANVGMVFQKPTPFPMSIYDNIAFGVRLFEKLSRAEMDERVQWALTKAALWSETRDKLYQSGYSLSGGQQQRLCIARGIAIRPEVLLLDEPCSALDPISTGRIEELISELKSEYTVVIVTHNMQQAARCSDHTAFMYLGELIEFSDTDTLFTTPKMKQTEDYITGRYGZ

SEQ ID NO: 3403 - protein, 244 aa, Photorhabdus luminescens
MGRNMDNLNLNKHISGQFNAELAHVRTELMAMGGLVEEQLSKAITAMHNQDAALAREVIEDDHKVNMMEVAIDEACVRIIAKRQPTASDLRLIMSISKTIAELERIGDVANKICQTALEKFSHQHQPLLVSLESLGRHTIQMLHDVLDAFARMDLEEAIRIYHEDKKVDKEYEGIVRQLMTYMMEDPRTIPSVLTVLLCARSIERIGDRCQNICEFIFYYVKGQDFRHVGGDELEKLLTKDNEZ

SEQ ID NO: 3404 - protein, 279 aa, Photorhabdus luminescens
MKSRVVITALLAGLTLVTGAAKADKLDDIKKTGAVRIAVFDSNPPFGFIDPQTKKLAGYDVDIANAIANDLGVKLELRPTNPANRLPLLASKKVDLIAANFTVTHERAKQVDFSIPYFATGQKFIARKGILKSPEDIKNLRIGADKGTVQEITLREHYPTAKVISYDDTPLAFAALRNGNVQAITQDDAKLVGLLANVPEAQKAEFEISPFSITREYQAVAAAKGQERLVEAVNQTLLKLEKEGEAAEIYNRWFGPETKSAQPRGDFKFAPLEQQTQSZ

SEQ ID NO: 3405 - protein, 246 aa, Photorhabdus luminescens
MFELFVTEQLLAPQYLGWLWQGFLITLWISACTVIASTLLGFVLAAARDSQLKILRWLVTAYTTLFRNTPLLVQLFFWYFASGQILPQEVMFWLNTPHEINLLGLSLAWPSFEFLAGFIGLTLYSAPFVAEELRAGIQGIGRGQKYAAHALGLTGWQAMRYVVLPQALKIATPPLLGQYMNIVKNSSLTMAIGVAELSYASRQVETETLKTFEAFGVATVLYIATIAVMEGWGQWRQQQAITRGHZ

SEQ ID NO: 3406 - protein, 248 aa, Photorhabdus luminescens
MDFSVIAENWRYLLLGTFPDGPLEGAALTLVISLIAGTISIVLGTVAGIALAMLKGFWVNLLAAVLGFFRAIPVIMLIFWTYFLLPVMLGMEIPEITTVVCALALITSAYLAHGVKAGIIAIGAGQWQAGLSLGFNRWQVLWYIVLPQALRMMVPSFINQWIALIKDTSLAYIVGVAELSFLATQVNNRSMVYPTEVFLFVALIYFVMCLALELTANYLVRRFTLQRRKISFFRFWRKEKLVLAPQYZ

SEQ ID NO: 3407 - protein, 254 aa, Photorhabdus luminescens
TAFPLISVPLMTLILFPAVNWLLNSPERDEGNNLLSEGDNSRGARSILFAEVKLMSFSAEKRILLADKFPPALITIELFASSLPTLDNMLLKSSCSLMKEIILPIRLCDNSTALLLSMVISLFAVKVILSLLVKNMSRKIIFLPAFSNKSPVASMRLIILLPSWLKYPTVSLLCNFKSALRLITVMFFPLILLCNTSILLAAIMDTSPPEITSPVFNVTASVAKIVMLLLALIILLLLIFPEFKTIFLADNASZ

SEQ ID NO: 3408 - protein, 1748 aa, Photorhabdus luminescens
SPKTGSLGRLLVSITDFLTLKLNKRDSTMSKRNNSVARGTSYLLIYLTAIQPLHPAIAAGITPDNNHTQVQNQSNVPVVNIATPNDAGISHNTYKAFNVDTQGAVLNNATQAAQSQLAGQLNANPNLHGKAAELIINEVTGSGQSNLQGQLEIFGNKANVMIANPNGITCDGCGFINTSSATLTTGKPQFDKQGALEALEVKTGQITIGGKGLDGKATDYVDIISRATELNGKIQANNLSLTQGANRISLKDGTVKPVAGEGAKPQLAVDTKALGGMYANKIRLVATEEGVGVNLKNLISDQRDITLNANGKIELGNIKAKTDLNVIGKETHIAPNINVQAGRDIILENTTLDNKGSVTAGRDIRIFGDTVRNNGDKALLQANNNMWIQKDAQGNKGHLIENKSATIKTVKGDLVVRTQKLNNTRDVFVVKNKELIPDSTDKNLIINETKTCDFGDPVIHEAALITPLPDKWFGRVDFGRDNTTDGGIHINHARTETINSDSKQPGVIASGKSIYINSDELLNFVSKMSAGKDIFLTGINFINESKITGVLNNYIVYTEKETEGSVSSRGDVYIRTDFDRSGNVKTWEDESNIIEPASVVAAGNLVADFKDNINIRTPPPYDINEMSQITVAGGYDALSAKNIVLNSGKINNNNIIKANNNITILATDAVTLNTGEVISGGDVSMIAANNIDVLQSKIKGKNITVISRNADLKLQSNETVGYFNHDGNRIISRIEATGDLLLNAGKNIIFRDIFLTKSDNITLTANNDITIDNNNAVLLSHKRIGSIISFIKEQELFNNMLSKVGKLDAKSSIVINAGGNLSAKSIRFSAEKDINLTSAKSIDLAPRELSPSLSKLFPSSRSGELSSQLTAGNNISVISGTDINGKAVQIQANGNVLLSSGRNITLLPLLYSAIAYNDDDRPEHYDEHKDDRNYGTQIRGTKKLTMAANGAITTVGSKLLSDGDITITSGGDIRFESARNHFYKDRADYFKDNSITETYTQQSTELTSGGVLTVLSNGSILFQATKLAAKGAMDIAAKGGYLYAQAMEESNHYENTETSRNWYGRKKTAKRTRHDVTNKVTEFTAGGDINLLSRDDSTYEASQIATNKNAKLTSTHGKVNFKAVKNTAFEQTITYSKGFYIKQRDKGYTEDKWVLPSIHIGGKLTVEAAKGVSADIKAKNGQSLQNVLTVLGNTPETAWLKGLNENKDTQWNVVKDAYDSWDHKSQHLNPVVSAVIAIAAAAATAGSSLAASVASYAGNSVAGGALTAGMSSLTAQAAVAIVDNQGDLSKALKVLGSSDTVKSTVTSMALGGALAGFDNVMGWDKAANGAQIDPAKATLPKLSHGDWSKVAQRVAGQSIISSSLGTAINGGSFKDNFTTALLANIGSQINAEGAGLIGANGQVLDLPGKAISHAAVSALAAEIGGGDAKGAAAGALAAELAAITLDKTFNDPMKIQAGGKIIGSVAGAIATNSAKGANSGANAGEIVILFNHLNSMNAYNLVRELQEANKQGTPTEAIWNKYNKLSATQRAEMLSHCAGNGGLCTLTYQAEMEGGIKTADAISGLRWMFGLSEEDSHRISQFVTTENQNDLGLLYNSLPAWEKGALIAKEAVESAGIGGAIGGKASVASIVGKHRGSAIPVLEPIVASNGLTYKSNPKHTLGQQGNRPNAGIEPKGSVDLFSHSISSASKEKQRYSIDSEKNVHRFSYSNDGTWHWSGSTGDQKNPLDRQEIPNDVKKNFGLPGKWRZ

SEQ ID NO: 3409 - protein, 560 aa, Photorhabdus luminescens
MGSRFLYHRRLTGLILLTISELVYASTSISPADQETITQQQKALLQQAEQQRETLRNNITLSPSPDVAPGTAESICHTIHRIEFDGAKSLPLPIKQHLIHPYLSHCLSLQDINTLVRQTTNAYIERGYVTSRAGLNAQDLSSGILIITVNEGKVESVSLDGETPLSLKMVFPSIVGKTLNLRDIEQGMERLNRLPSQQMTIDIQPGKQPGYSTVILKRTSIRLPVSASLGADNSGQKSTGTEQINASINLDNPLHLADQWSLSASRNSDFRNSHQSRSLSANVTVPYGYWLFSYQYAWNDSFQNIPACSQTYRYTGDSQTHRLAVNRTLYRDGEQKLALDMGLTRRRTTNLLAGETLSISSPTLSTINLGVNYSTVLAGSYVTFNPMVSHGLQTFGATKDDPRFSDAPRSQFRKLSLSASYFMPVTDSVYYLSSIYGQTTPDNLYASERLSLGGQYSVRGFKEQYLTGNRGGYWRNELNWRISELPIPSELTLTGALDTGWLQEKTGQIEGGNVTGTALGLSLTHPRFNQTITIGKPLIHPDHLKPDHWVAYWSVSLTFZ

SEQ ID NO: 3410 - protein, 490 aa, Photorhabdus luminescens
IDMPIFDTSCYKSVYLWVVGYALLWMIVSYSFDPTVPYDAVEALNWGKNGEWGSPKNPWLVGVMMLPAIHISGVSLSFYWYFIHFIAIAISMLGVWHLAFRLTGKKELAWLAMLTLNLSGIINFDIIPYNDNYLLIMLWPWIMLFFLRAVYDNPHWWLAFALSSGLATMGKYSTLALVGSVFLLTLFVPKIRQCYRQPALYLALVIWFVLVLPNFWWLWNNDFAAFKWVNSQIDSGFNLQTTRSLLSVFYPLIIVGIIIYQLGGRISWPKEQPNRLVNIIILLPLLIIYCWFSFNQGGRMTEWLHPFMSVSSALLVGSITRFPQKSLRSTLRGLIVVAVLILMGYVLIMAANVRGAGHKFEGIKDFSWQLEQRWHQHYSTPLHYVGGEYLHQWLTVYAPSQPETIQPWIPGKQAPNIYNRHVKASDIVRSGAILVGEKGKTCEQEDFHSVLQYWPKLRISSTEEFLFQPEPETKPILVCVGFVSPEKYQZ

SEQ ID NO: 3411 - protein, 618 aa, Photorhabdus luminescens
MSPKNDFKAFSISNNANVVSQEGYETSSALKTGFPPENITTHLLNKVLRQSSAISSTIANFIATQYGDDVLDDGDIVKLTTQLNKALEKKIATEIPSASLTQKGIVQLTDKTGNSNSLAVTQKLVSDVNDNANNRLAKNQNGADIPDKNAFVKNLGLAETANLAKNAVPNSRKINGKALTGDISLNAGDVGAFRLGLTGNNTVSNQVPWNANTGLYDLLRPGIDSQHIAHFNNGVGSCPAFQLKVQYKNSGIAYRSARDNYGFEEDWTDIYTTKNKPTAADVGAFRLGLAGGYSVNNPVPWNADTGLYDLLRPGIDSQHIAHFNNGAGSCPAFQLKVQYRNGGIAYRSARDNYGFEEDWTDIYTTKNKPTPADIGAYAKSEGSEFIQPKYINQANISDLTAWIKSLPQGGHAFRFSGNDSGIGYAWSGGYITRMHDIWAGFVAHYDYAGISFIHGNDGGGNTKVSRLWTDKNARSDANGILRVSSPVVDIHPDGTYELTSEAEGVTVKRIDTGKYRIRGCNGFAKDGAWGIHGGTIIPADSNGLNLIWVRESVDTTSGDITIECYHRQNKDAPEFAQNKRVKSVTATGEVVYYHDAEPCDIPDGRVINIRVQLPEKSZ

SEQ ID NO: 3412 - protein, 275 aa, Photorhabdus luminescens
YSFQSESKTFWCLFRQAINQINTGGIKTRFAGTSYQSKDKLFILFTVHQMLYFFIEILHAHAQTVKTFTTQVINHIQFNFTWVNFNRNFSIWQKIKMVTQQSHQFTDLVFIKISWRTTAPMHLTHFTTRKQLCPATNFPFKPLQIFIRLMLSTSDQFITTTEITELMAKRNMEVERKRSFRVTGSSLDKCCIIILLIEFQCRRIRSITRAGIIVFLDQRQIPNDGLLRHAHSFRCFCPSKRNTFICLICCAMVAPRSRVLRRDNRHSLPNNHNKZ

SEQ ID NO: 3413 - protein, 458 aa, Photorhabdus luminescens
MSEQAIVWDLPLIQKYNYSGPRYTSYPTALEFNQQYDNAAFIQAAARYPERPLSLYLHIPFCHKLCYFCGCNKLVTRRKHKADEYLQWLEREIRGRAKLFSGRKVSQMHWGGGTPTYLNKNQISKLMGLLRHHFDFLPDAEISIEIDPREIELDMIDHLRSEGFNRLSMGVQDFNKEVQHLVNREQDEEFIFALVARARETGFNSTSIDLIYGLPKQTPESFAFTLERVLALSPDRMSVFNYAHLPSLFAAQRKIKEHDLPSAEQKLDILQETIATLTSNGYQFIGMDHFARPDDELAVAQREGKLHRNFQGYTTQEECDLLGLGVSAISMLGDSYSQNQKELKTYYAELEKQEHALWRGLTLSQDDCIRRDVIKALICNFRLNFIDIEQQYELSFTRYFAEDLQLLTPLVDDGLVEVNEKQIWVTPRGRLLIRNICMCFDIYLRQQVRQHQFSRVIZ

SEQ ID NO: 3414 - protein, 1082 aa, Photorhabdus luminescens
LGKFLHRFIRWYVMGQEAYEAIQEKRLKPWKGEEEVRYIWMKAIEDATGFHLNAKRGRKDSSHNHVIIEFKAPGLFRGKKESAGFKNAIEERLLPYIQCESTKTGIPESDFIGIAIDGEHICFAQVHGDQIHTQHLIPFSTYAVDLVIDAFVSDTRKALTTENLLADFGHGSANAREFMQAMSDGLLYYLKQQGNNKVKMLFEEWRTLYGQVADMSISQTEAINKEIAFIWNGWPEDSTSARLFVIHTYNSILIKLLAAEIVSAHGLTSSTQPAQSMSAQKDDDELVNYLDYSVEKSAIFREAGINGFVEEAIFSWYIGLARNKVVPALLPSLRRLLSVLSLYRLDHLSRTRDVLRDLYQGLVPGKLRQSLGEFYTPDWLVDFTLQRAADDTLLEQRVLDPTCGSGAFLLAVIRKKRELAAIQGWSVSKVIKNLCDSVWGFDLNPLAVQTARVNFLMEIADLLAACPGMDIEVPVLMADAIYSPAEIPSGKNRVVEYNIGSQVAKLNIHLPVELALNRERLDFVFERMGKDVVQGLEFDKSSQKLIAASIVTQEELLNWYKPLRHTYDQVLNLHRKQWNGIWFRIVRNFFWSAAAGKFDLVIGNPPWVRWSKLPDLYRERVKPTCEDYGIFSKTKRHGGNELDISAMITYTVSDKWLDIGGKLAFVITGTLFKNPSSAGFRTFKLDSQREDSLYLQPLSVDDMKELKPFEDASNHTSVALFRKSIVSVQYPVAYKVWSANPGHRKAIRPCTPLDDVLKAISHTTKEAFPVGDEGSPWAILAPGRFNAIKYLSSPCKWTKGRKGITTDLNGVYFVPILQNNGALVQIQSRPEAGRKDIGPQKTQWVEPNMLYPLIKGASDFDECYLKLDAPDYDDVEQRLFTFVPNTGISNAEYESADVQLNSPKMKKTLAWFKGFERLLLERSTYRRQMKGAPYHAVYNVGDYTFKPWKVIWPEMSSSFYAAVASFQNVPVVGERVYIPDHKVYFASFDNKETAYYLCGLLNSLTVQEWINSHNVSIQVADVFKHLSLPNFDITNTMHTNLAELVEEAHQCHDKTERQKIIKRIKSVAEDVLITWSVTLVEZ

SEQ ID NO: 3415 - protein, 430 aa, Photorhabdus luminescens
MANILNWPDYIVLSVSELEHDYRVHVGTANPPTHCIHCKHPEIVGFGRRDEVIMDTPVNGKRTGIILNRRRYRCQICCKTFMEPVPHKDGKRQMTHRLIQYIERESLRRTFSSVAEDVGVDEKTVRNIFHDSCERLEKTFNFEMPKWLGIDEIHIIKPRCVIANIELQTIVDMLDNNNKATVMRYLTKRKDRYQVRYVAMNMWRPYREAVATMIPDATVIIDKFHVVRMANESLERALKAIRSGLTAQQRRRLMKNHFVLLKRRHEQTDAEYMRFSDWILNYPDLGYAYELKESFFGIWDCKNRYEAQQAYYVWLRQITPEMKVYFDPLVKAIDNWHDDVFAYFDHPITNAYIENLNNLIRVVNHVGRGYSFEALRAEILFTKGFQQSKNPHYQHQRIPEQACGPESETSINYGVDISALVREIEMGRLZ

SEQ ID NO: 3416 - protein, 491 aa, Photorhabdus luminescens
MQQGKIWIVDDDSSIRWVLERALSNAGMECTSFADADSALTALAQNTPDVLISDIRMPGMNGLNLLNNIKQSNPLLPVIIMTAHSDLDAAVNAYQQGAFDYLPKPFDIDEAVALLERALSHSRDQNQSIKSPQVVTPVSDMIGEAPAMQDVYRIIGRLSRSSISVLINGESGTGKELVAHALHRHSPRANEPFIALNMAAIPKDLIESELFGHEKGAFTGANQVRHGRFEQANRGSLFLDEIGDMPLDIQTRLLRVLAEGQFYRVGGYAPVKVDVRIIAATHQDLERLVQKGKFREDLYHRLNVIRMQLPPLRDRVEDIPRLTRHFLQQTAKELGVETKILHPDAEIALMRLPWPGNVRQLENICRWLTVMAASQEVLVQDLPSELFETHHNTESGMTTSVNTVSINTVPANTTPTNTIPKNWSQLLAQWATTALEHGQQDLLSEALPLLERTLLDCALKHTKGHKQEAARLLGWGRNTITRKLKELGLEZ

SEQ ID NO: 3417 - protein, 350 aa, Photorhabdus luminescens
MKTENLPDSGQILNSLINSVLVLDTDLVIRYANHAALQLFAQSARKLFGTPLPVLFSYFSLDTELMHSSLVSGQSFTDNEVTLVVENRFHIMSLSAQPISEQFILLELAPMDSQRRLSQEQVQQAQQTAARELVRGLAHEIKNPLGGLRGAAQLLSKALPDPALQEYTQVIIEQADRLRHLVDRLLGPQHPGERIKQSIHYVAERVSQLVSLEMPDNVTLVKDYDPSLPELAHYPDQIEQVLLNITRNALQALGKQGGTITLRTRTAFQITLHGKRYRLAARIDVEDNGPGIPPQIQDTLFYPMVSAHEGGTGLGLSIARNLIDQHSGKIEFTSWPGHTAFSIYLPIKKZ

SEQ ID NO: 3418 - protein, 470 aa, Photorhabdus luminescens
MSVEHVLTMIEEHQVKFIDLRFTDTKGKEQHMTIPAHQVNADFFEDGKMFDGSSISGWKGINESDMVLMPDPSTAMLDPFFDDATLTLRCDILEPGTMQGYDRDPRSISKRAENFLRSSGIADTVLCGPEPEFFLFDDVRFSSAMSHSYYHIDDIEAAWNSGTQYEGGNKGHRPAVKGGYAPLPPVDSSQDLRSAMCLTMEEMGLVVEAHHHEVGTAGQNEIATRFNTMTKKADETQIYKYVVHNVAHNFGKTATFMPKPLVGDNGSGMHCHMSLSKNGTNLFAGDKYGGLSELALFYIGGIIKHARALNAFTNPTTNSYKRLVPGYEAPVMLAYSARNRSASIRIPVVASTKARRIEVRFPDPAANPYLAFAAQLMAGLDGIINKIHPGDAMDKNLYDLPPEEAKEIPTVASSLDEALAALDADREFLTRGGVFTDDAIDAYIDLKNSEIERVRLTPHPLEFELYYSVZ

SEQ ID NO: 3419 - protein, 211 aa, Photorhabdus luminescens
TIKVNFRWFYMIDNRLIQRRHIFRHIFMISTGNSHQCRCIDNGEVQLLISRTQIDKQVKYLIHNPIRACARTVNFVNDHNRFQTMSERFLCHKTGLRHWPVHSIDQQEYAVDHRHNTFYFTAEIGMSRSVYDINTVVIPFNGGIFCENSNSTLFLQIIGVHHTLCRCRTVTESTGLLQQLVNQGRFTVVNVRDNGDITQFFDHKLCLRHLZ

SEQ ID NO: 3420 - protein, 607 aa, Photorhabdus luminescens
VIEKLRNIAIIAHVDHGKTTLVDKLLQQSGTFGDRATTTERVMDSNDLEKERGITILAKNTAIKWNDYRINIVDTPGHADFGGEVERVMSMVDSVLLLVDAMDGPMPQTRFVTQKAFAHGLKPIVVINKVDRPGARPDWVVDQVFDLFVNLGATDEQLDFPIIYASALMGIAGTDHEDMAEDMTPLYQAIVDHVEPPKVDLNGSFQMQISQLDYNNYVGVIGIGRIKRGTVKPNQNVTIIDSEGKTRNGKIGKVLGHLGLERIESEQAEAGDIVAITGLGELNISDTLCDTNAVEALPPLAVDEPTVSMYFCVNTSPFCGREGKYVTSRQILERLKKELVHNVALRVEETEDPDAFRVSGRGELHLSVLIENMRREGFELAVSRPKVIFREIDGRKQEPFEQVTLDIEEQHQGDVMQGLGERKADLRDMLPDGKGRVRLDYVIPSRGLIGFRTEFMTMTSGTGLLYATFSHYDDIRPGEIGRRQNGVMISNGQGKAVAYALYSLQERGKLFLGHGAEVYEGQVIGIHSRSNDLTVNCLTGKKLTNVRASGTDEATTLSPHIKKTLEQALEFIDDDELVEVTPVSIRLRKRHLTENERRRAYRSKEAZ

SEQ ID NO: 3421 - protein, 202 aa, Photorhabdus luminescens
FVKSIFLTGDNLMNQVLATKQQISFGMIFNLIGLFAISAVLTLAFYYQLVLSELPCPLCLLQRAGMIMIGFGFLFNLCFGIKSAHYGLSLIGCVVTGIVAIRQVFLHITPGDLGYGSALFGIHFYTWALICSVIAIIGISVMLILKSLEKTTEEKQKTSAIGQIIIGLFVILITANLISTILECGGGQCDDNPTFYQLLGKZ

SEQ ID NO: 3422 - protein, 3041 aa, Photorhabdus luminescens
QNCQWVVLCGVKIMNKQLYRIIFNQARQMWMVVAEIARAGRGRTGRRAHRSASPQRCCRLTALRFGVLFALGGISLTAQAAIVADGQAPGRQQPTIIRSANGTPQVNIQTPGADGVSHNTYRQFDVDKQGVILNNSHQATQTQLGGMVAGNPWLAKGDARVILNEVNNHNRSHLNGWIEVAGHKAEVIIANPAGITCNGCGFINSHRTTLTTGQALMERGRLKGFDVNQGEVRIDGHGMDSTQQSYTDIIARSVAINAKLHAQDLKVTTGRNIVDATHQQMKKKSIDDEKHPAFALDVAALGGMYAHKIRLIGTEAGVGVHNAGNIGASAGEVHITAEGRIENRGTLSSRDTLQLTSSADVTNTGKLLSQSAVNLQAKGALNNQGRVEARGDTTVTAGTIHSSHDSVWAAGLDDNGNTTRPGSLTLTAQHVQAKGKNLAADTLAIHSQRIDLSDSQTAASQIQLTASQLGISTARATVNADRLTAKTPGQFNNDGGQLVARAIHLTTPDISNLKGKINQTGTGELTLHTRTLNNREGTVFNQGKLTLTTDRLDNHQGTIASQGEDLHLTAHQADNNQGTVQLAGNGKLSLNTQRWLGDKGKLLTNGTLTIQAGELQLNHAETQAGQITINADTLSHQGGVMQQWGKDDLSLTTRILDNHSGTIAGNGNLNLKATTVDNRHGNIVAADQGSLKLTVKDTLDNQSGKLEAGHALQLSATQLDNRRRSIVAAGDSATLTVGKTIQNAHGHLEAKTRLTTTSQTLDNTQGVLLAQNIDSQTTGHPFTNTAGQVIAEDTLTVNSGQLDNTAGLLQAGREMAVDTHGHGLTNTHHADQKAGRLLSGGQLTLRTGDIDNTGGMIAADGKTVLTSTALNNTQGQIAGNSGLNIHSRQLTNREGTLQSADALTLDTDGQLLDNQQGQIIGEGKTTITSGPLDNRHGHLQGGQLAIDTRHAALDNRDGKLLSTDTLTLNTHQLDNRHGQVQAVGDTQLDVDTQTDNTGGLIRGGQQLTLNTARLINRETAHTDNGLEAQNLTVNAQQVDNTQGALRAANHLQANIRQTLNNTQGLVSAGKQLTVGDKSGPASLAINNRQGTLIAGEHAAITAHALSGDGQLLSQGDMAVTLTEDFHHTGNTAANGNLTLKTTGNITNNRQIKAGRALYLGAQNLINSASGEISAKQTQIQVHDTLNNTGLIDGGLTHLTANTLNNTGTGRIYGDQIALQTGTLNNSAQDGKAAVIAARDQLDIGTGTLNNQHHAQIYSVGDMHIGGQLDNALKATGQAGVLNNHAATIEAGRHLKINADRINNTNAGLVTQVVETEKSQHHDAVLSGQTTRYDWSQVDTSHRNKYKVHDAIMPDGSGSNDFYEYQYTRTVRETQVKQSDPGKILAGGNMTLNSAQVTNHDSQIIAGGALDGVIGELHNIATQGERITTDKGRQTHWYAKKKRLKPRFRGTKTSQGKSRSNYAPAPVIETIDLKTLAWQEHTRPQGTDITITDRQTGQIHAAPTTVTPVSGIKNQPLVLPPGQPFELSLPPETVKGQTVDPVIRVVTPDTRLPNNSLYTVQPGSDSHYLVETDPKFTQYKPWLGSDYMRQQLTHDPALVHKRLGDGFYEQRLVRDQITQLTGRRYLPGYNNDEAQFKALMDAGVAFGKQQQLTPGVALSPAQMALLTSDIIWLTNQTVTLPDGTTEVVTVPQVYARVRQGDLRSDGALLAGNTVALNSQGDITNSGTISGRDVTQLTANNLTNSGFIRGGKVDLTAQQTLTNRGGRIQGDDRVTLKGRDITSASTVRGDEANRWLDRPAGIYVQNDNGTLSLNAINNVQLTASDVKNAGKDGHTEITAGHNLTLDTLSTRRTEQGNWGKDNTRHLTQQQDIGSQITGAGEVTLQAGQDLNATAAHVNAGQHLTAQAGNNLTLTTGTASSDLVEHSKQTSKGWLSKSSVETHDEVHDRQALSTTFSGDKVTLQAGKDLNIRGSNVAGTQDVSLNAGHQLTVTTAAESHDETHLRQEKKSGLMGTGGIGFTLGKASQKVTTDSDSQLSKGSTVGSSQGNVTLNAGEQLRVHGSEVIAGKDLTLAGQQVDITSAENRHHTTTKTEQKQSGLTVALSGTAGGAVNSAVQTARAAHNESDPRVKALQNTKAALSGVQAVQAGRLAEAQGSDDKGNNNLAGVSLSYGRQSSRSEQQHRQTTQQGSHLTAGDNLTITAKGDGKGASGQNGDIRIQGSQLQAGKDLQLNAHRDIQLSSSQNTEQTTGKNSSHGSALGVGLTAGPGGTGLNVSANVSRGNGHENGNGVSHTNTTLQAGQTVGLNSGRDTTLKGAQVSGEQITAEVKRHLTLSSEQDSQRYDSKQQNASAGVSATVGPLTNGTASLNASRNKLHSNYDSVQEQTGLFAGKGGYQVNVGDHTQLDGAVIASQADKTKNTLNTGTLGFKDIQNQADFTVEQQSAGVSLGQPTAGQVLNNLAVNGLTGTHNSGHDSSTTHAAVSDGNLIIRDKAHQTQDVANLSRDTDNAANVLSPIFDKEKAQQRLKQAQLIGELSAQMTEIARTEGKIIATKAAKAKLNHISEPDKAAAREKLINAGNKDPSPADINKQVYDTAYTQALNDSGLGTGGTYQKALQAATAAIQGLAGNNLGQALAGGASPYLAGVIKELTTDPQTHQVDTATNTLAHAILGAVAAEVSGNNALSGAAGAASGELAAQVLMKQLYGDGANVSELTEEQKQTISTLSTLAAGLAGGIAGDSTGSAITGAQAGKNAVENNYLSVNELDSFAHQARTCEGESCKQVIKDMVDTNIRNQQEMMDFCNSNPTQCAQKYGYLVDQWPVFERTLKNMDRDGTLPVEFRNYLSAVNTLGQAATGKVGELGWTKRFEAMGMSQETAAAMAMTLPIVMEGAKGPKSSPKSSQNNAGKDAQPELAGKNTSGAENAATYPKLKEDLVQRNLSHIASQDPRLAAVVKGDNGKLNYGIGTGTRTEADRLGKIWVGDGAKKTTGNGWVSADGTRGYRPPSEKPNSAHATTGVQANFETYSIDSKGKINKTGNGHLNILDZ

SEQ ID NO: 3423 - protein, 462 aa, Photorhabdus luminescens
MLKIFNTLSRQKEEFKPIHPGKVGMYVCGITIYDLCHIGHGRTFVSFDVVARYLRYLGYDLTYVRNVTDVDDKIIKRAAENSESCDDLTGRMLAEMYKDFDALNILRPDLEPRATRHIQEIIALTESLIKRGHAYVADNGDVMFSVESDQDYGLLSRQDLSQLQAGARVEVADVKRNPMDFVLWKMSKPGEPSWESPWGAGRPGWHIECSAMNSKQLGNHFDIHGGGADLMFPHHENEIAQSTCAHDGPYVNYWMHSGMVMVDKEKMSKSLNNFFTIRDVLAYYDAETVRYFLLSGHYRSQLNYTEDNLKQARTALERFYTALRGTDASVPPAGGEIFEARFIDAMNDDFNTPEAYSVLFDMVREINRLKSEDMDAANGLAAELRKLAGILGLLQQQPEQFLHRGIQADDEEIAKIEALIKQRNDARKNKDWPLADSARNQLNEMGIELEDGPQGTSWRRKZ

SEQ ID NO: 3424 - protein, 485 aa, Photorhabdus luminescens
MLWFLLCIGLLLAGYFIYGKIVEKIFTIRPERKTPALSMADGVDYVAMSTPKVWLIQLLNIAGVGPIFGPILGALYGPLAMLWIVFGCIFAGAVHDYFSGMLSVRARGASVPVIVGNELGKTMKHFMNIFAVILLMLVGVVFVLSPAGLLNNLLKEAMGWDNIAIWVGVIFAYYILATLVPIDKIIGRLYPLFGALLLFMSVALMVGLAMSDKPFYSQGLDFTTNFNPKDLPIWPLLFVTIACGAISGFHATQSPLMARCMQNEKNGRFVFYGAMIGEGIIALIWCTLGLSFYEDTNALQAVIDQGTASLVVHEVSTSLLGTVGGILAILGVVILPITSGDTAFRSARLIIAEFLNIPQQQMTKRLLLSVPMFIVGYLITKTDFNIIWRYFGWANQTTAMVMLWAASAWLLRRNKFHWITTLPAMFMTAVCFTYLAFAPEGFALNWNISVVIGLAAMAVVTMTFFAKVRSQSASDNIKAKALNEZ

SEQ ID NO: 3425 - protein, 209 aa, Photorhabdus luminescens
MLYIFDMGNVIIEIDFKRVLAVWSNLSGTPLATLTKSFSMGETFEKHERGQITDLEFADTLCQEMNISLSFEQFAAGWHAIFINIRPEVIQIMKTLREAGHRVVVLSNTNRLHLDYWPHNYPEIAASADYLYLSQDLAMRKPEPDIFKYVLETEGYSPDQAVFFDDVLENVEAAKALGINSVHVVDRQTVPDYFEAIGFSEQNEGLNGZ

SEQ ID NO: 3426 - protein, 306 aa, Photorhabdus luminescens
MYHLRVPETEQELEAYYRFRWEMLRKPLHQPVGSEKDGYDTTAHHQMVVDEKGNPVAVGRLYINADSEGAIRFLAVHPNMQGRGLGKLIAMALESVARQEGVKRVVCSAREHAVEFFSKLGFENRGPITSPQTTPVRHFLMIKPVATLDDILHRPDWCNELQQAWYKHIPLSEKMGVRISQYTGQSFITTMPEAGNQNPHQTIFAGSLFSLATLTGWGLIWLLLQERQLGGDIILADADIRYKKPVIGRPKSVADLKNMSGDLARLAQGSKARVKLDVIVSGDQGIGAVFTGTYMVLPNAYTAIAZ

SEQ ID NO: 3427 - protein, 569 aa, Photorhabdus luminescens
MKWLGKSLVTLLLLVILAVITVYVVMQTNWGTHQLSQWLSHHSRYQVQIGNIEHNWSQPGTLTFSNIVISNQQQTFILAAQVAAFDFNWQQLTSPRHFHRLLLQQGQLTIKGQQQSLPFSANILQLNQMAIQSENASWQIQGQNITGGITPWNPQLNTLAGNGEFQFSADKLNFNDISLDKVIMRGDNQQNTLTLRSFGATLAQGSVSGNGQRLPDGSWQWDNLLISNIRWQTPMALEELLRKTNKLPAISIKDLSLTNAKLEGKNWSANYLDVSVKNVGLTNGIWQAKEGIIDFNVMDITLNDLHFTDVIGHLLLAGNELTISNLTSRWEKGLFHVKGQWNHQTKQFNITNATVAGLTYTLPQNWHQLLKKSLPKWISRFSINELTINNSLLIDINPDFPFQLTALSGYIYDMELLKEGKWGIWHGSSNLSATSATFNKVELRRPYLKLHTEGDTLILDQLDASVDNGLLKVKGTVDQQVQKPFTLDFRGIDADLTILPQWRWVPLKLQGKGNFTLLIQGDLAADNIKSTIDGSLTATDKQSGSETQIINKGQISTPNCETCPVVKLZ

SEQ ID NO: 3428 - protein, 514 aa, Photorhabdus luminescens
MKQKSSNEGNIRTTRPLTGTEFLDGLNDGREVWAYGERIHDVVNHPAFQNPARAIAKLYDALHDPAYRDVLTTATDTGSCGVTHPFFRIPRSQQDLIADRDAIAAWARMSYGWLGRSPDYKASFLTSLGVKPEIYGDFADNAKSWYIRSQESVFYWNHSIINPPIDRHLSPDEIGDICIHVEKECDDGLIVSGAKVVATGSAISHYNFIGHYGLPIKKREFALVFTLPMNTPGVKLICRPSYAMAADKMGSPFDYPLSSRFDENDTIMILDKVKVPWENIFIYGDVDKVSLFFAESGYFHRAMLHGVTRLAVKLDFLSGLLIKGVEATGTKDFRGVQARVGEVLSWRNMFWALSDAMIKSPEPWSGDALLPRYEYGIAYRWFMTLGYPRVKEIIEQDLGSALIYINSHARDFSNPELSPYLDKYMRGSNGYSAVERVKLMKLIWDSIGTEFAGRHELYERNYSGNHEAIRVDVLLASQATGLVDQLKGFAEQCMSEYDLDGWVGNDFIWPSNRZ

SEQ ID NO: 3429 - protein, 462 aa, Photorhabdus luminescens
MLTSSPKQAETIPPKKSASELIYRLEDRPPLPQTLFAACQHLLAMFVAVITPAILICQALGLPTHDTQRIISMSLFASGLASLIQIRTWGPIGSGLLSIQGTSFNFVSPLIMGGLALKNGGADISTMMAALFGTLMVASVTEILLSRVLHLARRIITPLVSGVVVMIIGLSLIQVGLTSIGGGFSAIENHTFGSPEHLFLAGVVLVVIVLLNRQRNPYLRVASLVIAMTVGYVAAWLMGMLPPATVQENGSLMTIPAPLYYGLSFDWNLLIPLMLIFMVTSLETIGDITATSDVSEQPVSGPLYMKRIKGGVLANGLNSMLSAVFNTFPNSCFGQNNGVIQLTGVASRHVGYAVALMLMLLGLFPAVAGFVQQIPEPVLGGATIVMFGTIAASGIRIVSREALNRRAIMIIALSLAVGMGVAQQPLILQFAPDWLKTLLSSGIAAGGLTAITLNLVFPQEKZ

SEQ ID NO: 3430 - protein, 403 aa, Photorhabdus luminescens
MYHLDVYGTLVASALVLLLGRKLVQSVPFLEKYTIPEPVAGGLLVALILLAVKQTTGWEINFDLSLKDPLMLTFFATIGLNANLSSLKAGGKVLFTFVFVVVGLLLVQNTVGIALAELLGLDPLMGLLAGSVTLSGGHGTGAAWGKLFSERYGFENATEVAMACATFGLVLGGLIGGPVARFLVRNTKTPGLRGDDTEVPTAFEKPYTGRMITALVMLETIALIAICLMAGNFVSELLQGTWFELPTFVCVLFIGVILSNSLSVLGFYRVFDRAVSVLGNVSLSLFLAMALMSLKLWQMASLALPMLVILTIQAIVMALYAIFVTYRVMGKNYDAAVLAAGHCGFGLGATPTAIANMQAITDRFGPSHVAFLVVPMVGAFFIDIVNAIVIKLYLLLPVFPAVZ

SEQ ID NO: 3431 - protein, 248 aa, Photorhabdus luminescens
MKDNTLYGPIAHLYESFSDATDHIKVEIRTIFNLAGDIHGKSVLDLACGYGLFSREYRNRGASKVIGVDISENMIAIAKSKSQQYGDDIEFHVRNICKMESESFGKFDIVNAAWLFCHAESLEDLETMFRVIAAHLKPAGKLIAYTFEPDYRLEKGNYENYCIKILSEEPVKDTTLVKAEFLTTPPSPFTMYRWSREQYQTAIQKAGFKQFKWQKPMLLERDIEAHPPGFWDDFQRNCLDTALVCQIZ

SEQ ID NO: 3432 - protein, 261 aa, Photorhabdus luminescens
KGLATMKLFNALGFRWDRSAAPLIVPIHSIERVCFRFHRMLPEFVWDAGVLEGNPFTFPEVKTLLDGVTVGGRKVSDQQQILNLAESARRLLVLVKTGQFELTKATFAELHSIVACNEALEWGMFRGEGQETNYTPDVSLGNQGRHTPLPTESGAPELNRVFHEGLAALRECRPFEQGAAFFLFGALQQFFFDGNKRTSRFMMNGILMSNGIDAISVPAAKLYEFNEKMVRFYLSKDATEMMMFLMDCHPDKVANLGFFKZ

SEQ ID NO: 3433 - protein, 694 aa, Photorhabdus luminescens
MRGPLLDAIPLTSLRGVGANQAAKLAKIGLVNLQDLLLHFPLRYEDQTRLYTINDLLPGISATVTGEILRTDVTVSRRRTLICKISDGTGVLTLRFFNFSAAMRNNLAKGKQVVVYGEIRRGGQGAEIIHPEYKIQNHTGNVQLQETLTPIYPTTEGVRQATLRNLIDQALKLLDTCTINELLPEELSRSIISLPQALHTLHRPTPDIALVDLETGKHPAYRRLVLEELLAHHLSMLAVRAGVQRYHAQPLPTEDKLKPQFLNRLPFSPTHAQQRVVSEIEQDLAKDVPMMRLIQGDVGSGKTLVAALAALRAIAHGKQVALMAPTELLAEQHANTFRRWLEPLGIQVGWLAGKQKGKARQKQQEAIANGQVAMIVGTHAMFQEQVKFSGLALVIIDEQHRFGVHQRLALWEKGREQGFHPHQLIMTATPIPRTLAMTAYADLDTSIIDELPPGRTPVTTVAIPDTRREEIIKRIRNACLDENRQAYWVCTLIEDSDVLEAQAAQATSEELTLALPELKVGLVHGRMKAAEKQQVMEAFKCGELQLLVATTVIEVGVDVPNASLMIIDNPERLGLAQLHQLRGRVGRGAIASHCVLLYKTPLSSTARIRLQVLRDSNDGFVIAQKDLEIRGPGELLGTRQTGNAEFKVADLLRDQGMLPEIQRIARHIHQHYPEHARALIERWLPERVHYGNAZ

SEQ ID NO: 3434 - protein, 243 aa, Photorhabdus luminescens
LHMCTLFIADLHLSEHEPAITAGFLRFLREDAIQADSLYILGDLFDYWIGDDDNNPLHREIASALKTVQQQGVSCYFIHGNRDFLLGSRFAKESGIILLPQEKVLELYGKRVLILHGDTLCTDDEGYQRYRKRVHTPWIQRLFLLLPLSIRQKIAVKMRANSQSVNRRKSEAIMDVNQQAVIDTFERYQADWMIHGHTHRPFVHEVPLHDKTVYRGVLGAWHHQGSMFKITDKSIDLISFPFZ

SEQ ID NO: 3435 - protein, 189 aa, Photorhabdus luminescens
MGQRKYLTQSEVESMLEMAKVGPNPERNYCLVYMSYIHGFRVSEARHLRLSDMELKEKCLYIRRLKGGFCTNHPLLQREVKAIKAWLKVRKTLQGADSDWLFLSRCGKPLTRQRIYQIINQLGQRANIAVDPHPHMLRHACGFALADRGIDTRLIQDYLGHKNIRHTVRYTASNAERFQGVWSIKGRRZ

SEQ ID NO: 3436 - protein, 207 aa, Photorhabdus luminescens
KEINEMKRQILKISVVAALVLGAASAANAANNAIVNVTGSIVTATCDVTNPGSNGTVDTGNHIKTAFTAPPDGKFPGAGISKFINDSERHFTIGLADCSSDNKDASKVKLYVTGNTLEGSGGYLFNKDINKQAGIVLSYLENNVLTPIKSESTVAMIVPNVKKDNKEEPDIKNSYAEFVVYIATKSTDAPGNQRITAPITFSYAYDZ

SEQ ID NO: 3437 - protein, 265 aa, Photorhabdus luminescens
CLLLGNYWLVEPRYEKQKMISKLRLPNIIVKSLVLAAFLFASQSWAEGGFGINATRIIFLQDKAEAIVSVRNTTTNIPYLVTTKITSTVDGKGKTPFYVTPPLFRLDPKGTNVLHILGDTSKLPTDRESVFYFNAAAIPSSKPSGQRLEGDKIAGGVVYAIGNTIKLFYRPTGLVGTPELAYKALRFTHAPGGVQVSNNSPYHISFTQIKVDGVPVKFSDSHPQMLAPFSTHVYPAQNSQNKKKVEWAVISDLGGGENFDGEIQZ

SEQ ID NO: 3438 - protein, 246 aa, Photorhabdus luminescens
FEVSTMFGTATEQKKSRLNDPSTFLPKGRNPVLQVVMRCFCWSSVMVLLFLASSVMADDPNPKPKTGPKYPPTITSGIDVQVNVTVYPDPCDIEIDGDDINGSELNFGSLLAAEFSHEGDVSATKSFKLKLTNCGDPDSVGFVPKLTVSGNTIDAEQGSIFSDPNSGDPGASEGLGFIILIGEEKKEIGLNDDLIINHREINVPVEFDEGSGETDVTVAIARGRDSKVIQPGTLIAHVTFTFSYQZ

SEQ ID NO: 3439 - protein, 232 aa, Photorhabdus luminescens
MKTKNSNLINSELMTYHSRAKYVLLFMMLIGWTIGCVTTFPVQAKDPNTNRTINFRGMLLPPTCVLSVNGSSFADFYNYYIAPVYASELRNSKYIARDPLELNFMFSDCDLGESRPALYIWSDVPAITDPELFMPDAKFNSTKGVGVRLFDEGTNKFVEVRNETDPYRVDLSDSVKGNGGKLEGAMRRFRAYVGGLGDTNNPVTCKTGSNSINVLCGGVADVNIHFEFVYQZ

SEQ ID NO: 3440 - protein, 246 aa, Photorhabdus luminescens
MKKMIVMGMLAIWAVMASSPAHAGLMLRKTRIIYHQGDKVQSMSLQNSGDEVYLIQAAVTPGDNSNTRSSEFTVLPPLFRMEGNSLNVMRVIRTGGDFPADRESLFRFRINAIPAKKTLDESKANGNGKPGEIGASLSIALGMNIKLIYRPDKLPMTPEQAYGRLTFIRAGNTVVVTNPTPYYQTFAQLKFDGKAVDLNKAPSMLAPFGQMTFSLAGTAGSKVTWSMITDAGGVSRLQSGTLRADZ

SEQ ID NO: 3441 - protein, 277 aa, Photorhabdus luminescens
VCFYILKLEEHDMVERNISIKQIVITVSCVLAIILPVLPLRAAESLKGLHLNDTRVIYPESSSNGVSSTLINNSDNNYLIQSIVQELNPETGLPLGVKAPFIVIPPIAKVGADERLVLKILRIGGVLPKDRESLFFLNLHMLPSENQLPVSRDGSGKMKMVTALAVKLFYRPEGILKEGVAGAVKQLSASVKEDVVMLTNPSPFWITLQTLQVSSFAVPGKDLFRMVPPFGQQSWSLPAGKVSPGSHVTVSWRAIDEFGLDTDEESRSIAVSGSGQZ

SEQ ID NO: 3442 - protein, 915 aa, Photorhabdus luminescens
LRMKVLIPAISCRSKRPFTCCRCVNQGISTSLTLSKHQMGGSLVFCRVMLVFLTGWSAHATARDYFDPALLGFGSNSGQPVDLSQFETVGGQAPGTYRVDIYVNGTFFDTRDITFQRHGEGNAELTPVLTPDLLEAAGVNISGIPALKALPVDKPIESPLGKLIPQAAARLNFSQMRLNVSVPQIAMKPSTNGLVDPTLWQEGIPAFLLNYSINGSQNQRSQFGNKQTNQSLFGSFNSRLNLGAWRLRNTATYSYSSQTDNRYDSFDDAVKKTTESQQRWNFQQTYLQRDVVALRSDLTIGDTSTGSVAGQVFDGFPYRGIGLATSDPMMPGRLSGFAPIISGIAKSNAQITVTQNGSVIYQTNVAPGPFRITDLVGSSVGGDLQVTITEADGTHHGFTQAYSSLPMMLRQGQFKYEVAAGRYYSSGYGSGIRKPVFGMASMIYGLPGNVTLYGGGLVAQSYQSAALGTGLSLGMMGALSADITTSRTRLQNTPDILRGESYRAKYSKSMLTTGTTVDLTAYRYSTRNYLSFSDANTQGYSVWGELPSWMSERRRSSWQMRLSQSLPGNYSLWLSGQRDNYWGSSKTNTTLSMGLNGSFYRVGWGLNYSIDRMRGNGDWPENRQISLNVNVPLSLFGSYAALNNAYANYSFSRDSTGRSNNQLGIGGSVLDDNSLSWNVSQSQANKGRGRSGSVSMGYLGSFGQANLGYNYDSWGGRGVNYGFSGGLIAHQHGVTLASRIGDAAVLVRTSGVAGIRVMNSSSVTTNRWGYAVVPYAQTYSRNSISLDPSSLPEGADMAQGSKNVFPTSGAVVMVDYPVRIGQQLLMNLTYNGKPVPFGAMAGLKGDTDTNLAAIVGEGGQVYLSGMPPSGVLKVKWGSTPDKQCEVAFNLGPPPVKAKADKRWNPMRQLNETCRZ

SEQ ID NO: 3443 - protein, 468 aa, Photorhabdus luminescens
FGRDGVYQRMKISNRTTGKLLPVGQPMKTNKTFINKIKQDMSWMVVHCRWWSMPIWVGMICLSVGIFSSPTLFAASTINWNADRAIDALGPARKVKWSDGIITYPATGKATLKDVFPTLSMQWGSSKTLDQVKFRLKAGHGEIFKVPRVVSGRYECSIEAKFTNGRPGVAIPKENMAVDIDGTGTKYSKSPVALVARTTGNQDDESVAKAELSDLSFDVSCQGVNFSWERKAAEKVEFETQNVNAPVGILIDGGDFMWWSRPILPTIKDPVTVISPPECIFESQSSENFDLGEIRREPSDAIFPKELHRATVGIFDLLISVVCDTPNKDDTGVAIVNFSTKHLGVDGKSIVMDTNDETGGKDFDNALAIKVLPRVLGIQTKLVGGNQIGQPVTFGSAADPKSVLVFNVDDKSAVKKIKKDEHGNEIGEYYSHHSLNRFSVQLWQTKAIDPKLSGEFKTSMEATLVMKZ

SEQ ID NO: 3444 - protein, 366 aa, Photorhabdus luminescens
MKPVCVLGNGQLGRMLRQAGEPLGITVYPVGLDAEPEAVPYQNSVITAEIERWPETALTQELARHKAFANRDIFPRLADRLPQKQLMDSLGLATAPWQLLSDTNQWPQLFSELGNFVIVKRRMGGYDGRGQWRIHPGDETELPADIYGECIAEQAIPFSGEVSLVGARNKNGDCVFYPLAHNLHQDGILRASIVSPQENYHLQHHHLQHHHLQQQAESMLSAIMHELKYIGVMAMECFIVGDNLLINELAPRVHNSGHWTQNGASISQFELHLRAILDLPMPRPVVTAPSVMINLIGTDINAQWLSLPLVHLHWYEKEVRPARKVGHLNLSHFDKNELKNTLQKLIPMLPPEYQSGLEWAQEKLIZ

SEQ ID NO: 3445 - protein, 706 aa, Photorhabdus luminescens
LYLFESLNQLAQKYLPGAQIELLKQAYSVARDAHEGQTRTSGEPYITHPVAVACILAEMRLDHETLMAALLHDVIEDTPATFQDIAQPFGPVVAGLVEGVSKLDKLNFRDKKEAQAENFRKMVMAMVQDIRVILIKLADRTHNMRTLGALRPDKRRRIARETLEIYSPLAHRLGIHHLKTELEELGFEALHPNRYRVIKEVVKAARGNRKEMIQKILSEIAGRLTEAGIECKVSGREKHLYSIYQKMHLKEQRFHSIMDIYAFRVIVNNVDICYRVLGQMHSLYKPRPGRVKDYIAIPKANGYQSLHTSLIGPHGVPVEVQIRTEDMDQMAEMGVAAHWAYKEQGESGTAAQVRAQRWMQSLLELQQSAGSSFEFIESVKSDLFPDEIYVFTPKGRIVELPAGATPVDFAYAVHTDIGHACVGSRVDRQPYPLSQSLTSGQTVEIITAPGARPNAAWLNFVVSSKARAKIRQLLKNLKREDSIGLGRRLLNHALGSGKKLVDIPPESINKELTRMKLSTIDDLLAEIGLGNTMSIVVARNLLGAPPENTTNTYHNNGARKLPIKGADGVLITFAKCCRPIPGDPIIAHISPGKGLVIHHESCRNIRGYQKEPEKFMAVEWDQEINNDFTAEIKVDMFNHQGALANLTAAINAANSNIQSMNTEEKDGRVYCAFIRLTTKDRIQLANIMRKIRIMPDVMRVSRNRNZ

SEQ ID NO: 3446 - protein, 208 aa, Photorhabdus luminescens
MIQGTLYIVSAPSGAGKSSLIQALLKTQPLYDTQVSVSHTTRAMRPGENQGEHYFFITEEAFRQMIDNNEFLEHARVFDNYYGTSRKVIEETLASGVDVFLDIDWQGAQQIRKKMPSARSIFILPPSKEELCRRLRGRGQDSEDIIEKRMDQAVAEMVHYNEYDYLIVNDDFNTALADLHTIIRSERLHRERQAQRHDALISKLLADZ

SEQ ID NO: 3447 - protein, 432 aa, Photorhabdus luminescens
MNQHNEFSFSTETKDTFIKQRSGSKAISYDSNGVIDSNNSGTAILLQNGHIVAWGDARYGGELPPEIAQLNDIVSLSATYAAFAALRADRSVVAWGSAGYGGKIPPEIAELNDIVSLSSTYAAFAALRADRSVVTWGSAGYGGELPPDITQLNDIVSLSSAYAAFAALRADRSVVTWGDADYGGELPPDITQLNNIVSLSSAYNSFVAFRADRSIITWTSSHSYVPSRTAQLNDIVSLSINDNAFAALRANRSVVAWGGGYSNYVPSDIAQLNDIVSLSTNDDAFAALRANRSVVVWGRSDRNDVPSEIARLNDIVSLSSTNSAFSALRANRSVVAWGDLDNGGILPLDVAQLNDIVGLSATNSAFAALRADRSVVAWGKPSTGGFVPPEIAKLQDIVSVDSSGSAFTALRTNGKRVGWGGGDIKAHGEYDZ

SEQ ID NO: 3448 - protein, 422 aa, Photorhabdus luminescens
VKANPILTLFRRANMNQNDHLSSNMATGDRFIQQNLKSGRESNSGGNTSIVSIELADDSFPQNNISIKLKTAMLLQNGRVITWGKKRFDTQEAPPPIAEFAELQGIVSLSATHSAFAALQADGSVSIWGPLINGLLPLESVDKMKNIVSVSAIPIRDVFTGLRADGSIASWGAVDFLNTALPRMCGLSLHNIISLSATEQSFAALRADGSVVSWGLDFLPTPPEIAALKDIVSLSSTNNTFVALRANGSVVSWGVEIIPPEIAKLQDIVSITTNYNYAAALRADHSVVSWWGIVVPPEIAALKDIVSLSATPYAFAALRADRSVVAWGDIDIGGTLPLKIAQLNDIVSLSAADCAFAALRADGSVVAWGQPSRGGYVPPEIAKLKDIVSLSASNSAFAALRADGRRAGWGGGDTKAHGEYDZ

SEQ ID NO: 3449 - protein, 286 aa, Photorhabdus luminescens
LVVMLTISCNLAISGGIISTPQETTLPFARKATKVLFVELRLTISFNAAISGGVGKKSNPQETTLPSARKAAKDCSVALRLMILCSDNPHILGRAVFKKSTAPQEAMLPSARRPVKTSLIGIALTLTIFFILSTDSKGSRPLINGPQIDTLPSACKAANAECVALRLTIPCNSANSAIGGGASCVSNRFFPQVITLPFCNNMAVFNLIEMLFCGNESSANSIETMEVLPPELLSLPDFRFCWIKRSPVAMFDERWSFWFILALLNKVNIGFAFTYKIKSVYRELSZ

SEQ ID NO: 3450 - protein, 230 aa, Photorhabdus luminescens
MKTSKEYYVHTYTQPSRPQITSNPQIIDWVPEKAILALGTPKIYGKENNDKLVRYPESGTSTLVFPKGDPHFDFPGTRLPDTAVLKDMMFWIKTKNRIFIVPHVVTGKYTCEIIASRKDGQPGKATITLYTDAIVENNEPQWFKGDSNVMESKLLDLCYEVSCEGTGFSWQRKPEEQVQFENNWENGVPLIIMQDSQDMQNVIYSLVLWSAPVDLNPNFKDPAILLPNEZ

SEQ ID NO: 3451 - protein, 295 aa, Photorhabdus luminescens
MKISHVTTGELSPSEYPMNAGNTFINRMKQDIGRITAHYRQWPVWMMCVSVGALFSTSVFAAATPNWNPSWAIKALGNPVINGQDNNGKPIRYPEEGTSTLLNVFPTVRNHNFPKPIGKEMMLKDGMFWVRAQYRIFKVPHVVTGKYTCKMVAKRKDRSPGEATVTLYTDAIVVNPDIYWFKGDKNVMESNVNDLTYTVNCLGTGFSWERKPEEKFELESKWENGVPSIEMQDTCNWIHNVAFWTPPDNNPNNRFKDPAIQKPTSTGSANLAKPDPCDNPDNISGVRKADSRNKZ

SEQ ID NO: 3452 - protein, 247 aa, Photorhabdus luminescens
SSEKGGPLKGQYNLAGTGLSQRMKIFNMATGELSPSEYYQPNPAAPSWNPTWAVKALGQPVINGKDNRGKPIRYPESRTSPLLNVFPPVKNRNFPKPRVDDMTLEQGRFWINAQNSIFKVPRVVTGTYICQMVAKRKDKSPGKATVTLYTDANVVNYILYRFKGDKNVMESSVNDLIYTANCRGTGFSWERKPEEKFELESKWENAALTIKMQDTCDWIYDVAFWTPPSNNPNGQFKDPAILRPNSZ

SEQ ID NO: 3453 - protein, 656 aa, Photorhabdus luminescens
EPLGRESLMAALNQILNTSGFHHKYLLCVVYEKARYLGISGSYSSKRFAKLLSLPWTASLYPLFCCYAWIAKEQRMLNLLILILFIVFSSPIVAAEIFVSNTEKNCPEWSQDKLQRETNSLMQQMAHWDQLYRQKGISEIDDEVYDQLMSELTHWQFCLKQAPHSDFPVEVFPDNKLVHPVAHTGLSKLKDKQEINRWLHGRLPVWLQPKIDGVAVTLVYQNGKLVSLISRGNGAEGVNWTAKSRYIPDIPQNIENAPPDLVLQGELFLHKEEHRQQLLGSDGARNRVAGLMMRKDHSSELKQIGLFIWSWPDGPAEMESKLRKLADMGFPLALRYSHKIEEPEQVQKLRMHYFEQPMLFATDGIVLKQEIEPKGNQWRSGSNSWAVAWKHPLRHQVTQVREVNFTIGRTGKISVVLGLDKVKLDDRQISRVNIGSVRRWRQLDVLPGDRVTLTLAGHGIPKLAQVVWRIKERQDIQPPDKQHYHALSCLTLTVGCEQQFNARLKWLGENLQMTGVSSGSWAMLTERKLVTDLTGWLALSAQQIAALPGIGDKRAQAIYSQFSKAKNQPFSYWMKGIGVPYMDKLSDNVYHWQQLEQKLAAAQLKQQLTVGQLKKLSDFVSDAQIKAIAEKLSVAGITGFDRENGVVVNPADMAQZ

SEQ ID NO: 3454 - protein, 206 aa, Photorhabdus luminescens
MLLSVLYIIGITAEAMTGALAAGRRKMDMFGVIIIASVTAIGGGSVRDILLGHYPLGWVKHPEYIVTVACAAVITTWVAPMMKHLRRLFLILDAIGLIVFSILGAQIALEMNHGPIIASIAAVITGVFGGVLRDMLCNTIPLVFQKEIYAGVSFTAAWLYIGLQHTPLPQNGIVLITLIAGLTARLVAIRYRLGLPVFNYEHSDHZ

SEQ ID NO: 3455 - protein, 321 aa, Photorhabdus luminescens
VAKKEKRPHHDGLFKYFLTQPETAREFLSLYLPEEIQSLCDLATLKLEPGSFVDEHLRQLHSDVLYSVETARGQGYIYCLIEHQSTPDPLMAWRLMYYAMLAMAAHLKKGHTELPLVAPLLFYHGEIRPYPYSNRWLDCFTLPEQAARLYRQAFPLVDVSVLSDEEILTHKGVALMELVQKHIRCRDMQEWLLQLVELLNAGYNTTEQLNVVLLYILLNGHTLDLSHFVHQLIEQSPEHETMLMTIAEQLEQKGLERGIKQGIELGREEGREEGREEGREEGREEGKVETARALLQHGVSLDIIVTSTGLSRDKIETLKHZ

SEQ ID NO: 3456 - protein, 435 aa, Photorhabdus luminescens
CKDNKMAFQERQITLDNRSHQLTNINVWTPDSQWLAYDVRPNGASFTGLTIEKIHVQSGKTEIIYQAKEGAHVGVVTVSPTEPVRYAFIHGPECPDEQWHYDFHHRRGVIVSEDSSGKAVTLDAMDITAPYTPGALRGGSHVHVFSPDGSRLSFTYNDHVMHKLDPALDLRNIAVAVPLKPVEPPKHHPREYDGSYFSVVVSTTTFRPEPGSDDINRAYEECWVGQAGYRKADGNWQRWALAFIGDTISATGEKVPEVYIVDLPEQDADYAIAGEKPLQGTETTLPAPPASVMQRRLTLTSHKRWPGVVNNPRHWLRVSPNGEQIGFLMKDDNGIVQLWTISPNGGELRQITQSYCGIQSAFSWENSGQFVAFICDNSVMLCDVQNGQMQRLTKRTEKAPAADAVVISPDSHHIAFMREVDGYMQIFLVETGLKZ

SEQ ID NO: 3457 - protein, 418 aa, Photorhabdus luminescens
MIFSQFGNKFTQDAGITRLMNDLNQGLRTPGAIMLGGGNPAHIPEMDDYFQQLLTEMVASGQLTETLCNYDGPQGKDTLIRALAEMLREKLGWEIGTQNIALTNGSQSAFFYLFNLLAGRGEDGSVRKVLFPLAPEYIGYSDSGLDEGLFVANKPNIEFLPEGQFKYHVDFDHLNITEDIGLICVSRPTNPTGNVITDEELQRLDYLAQQHQIPLLIDNAYGVPFPGIIFSEATPLWNPNTILCMSLSKLGLPGSRCGIIIANDKIINAVSNMNGIISLAPGGVGPAMALEMIRRNDLLRLSQEIIRPFYQQRVQDVIQIIRRYLPAELCLIHKPEGAIFLWLWFKNLPITTETLYQRLKKRGVLMVPGHYFFPGLEQDWPHAHECMRMNYVPDPESIAKGIAILAEEIERAHQQAAZ

SEQ ID NO: 3458 - protein, 305 aa, Photorhabdus luminescens
MQKFDTKTFQGLILTLQDYWARQGCTIVQPLDMEVGAGTSHPITCLRALGPEPIAAAYVQPSRRPTDGRYGENPNRLQHYYQFQVIIKPSPDNIQELYLDSLKALGLDPTVHDIRFVEDNWENPTLGAWGLGWEVWLNGMEVTQFTYFQQVGGLECKPVTGEITYGLERLAMYIQGVDSVYDLVWCDGPLGKTTYGDIYHQNEVEQSTYNFEHADVDFLFTCFEQYEKEAQDLLALETPLPLPAYERILKAGHTFNLLDARKAISVTERQRYILRIRTLTKAVAEAYYASREALGFPMCNKNQNZ

SEQ ID NO: 3459 - protein, 690 aa, Photorhabdus luminescens
MTQQTFLVEIGTEELPPKALRSLAEAFAANFAAELDNANLAYGEISWFATPRRLALKVANLDEAQADREVEKRGPAIAQAFDTEGKPTKAAEGWARGCGITAAQAERLVTDKGEWLLYRALVKGRSVKELLAAMVNSALNKLPIPKLMRWSDKETQFARPVHTVTMLFGDELIEGEILGIKSARVIRGHRFMGESEFAIDNAEQYPEILQQRGRVLADYTTRKVLIKQDVEQAAIKLGGVADISDSLLEEVTSLVEWPVVLTAKFEEKFLEVPAEALVYTMKGDQKYFPVYDNAGKLMANFIFVANIDSSDPQQIIDGNEKVVRPRLADAEFFFKTDRKQRLEDNLPRLETVLFQKQLGTLRDKTDRIQALAGWIAEKIGADVNHATRAGLLSKCDLMTNMVFEFTDTQGVMGMHYARHDGEAEDVALALNEQYQPRFAGDELPSTGVSCALAIADKMDTLAGIFGIGQHPRGDKDPFALRRAALGALRIIVEKKLPLDLQTLTEEAVRLYGDKLTNAKVTDDVVEFMLGRFRAWYQEQGYRVDTIQAVLARRPTQPADFDARVKAVTHFRTLDEAAALAAANKRVSNILAKSEETLNEKVDVSTLKAPEEVKLATHLIVLQDKLAPLFAEGHYQEALVELASLREVVDAFFDNVMVMDEDLQVRVNRLTLLSELRDLFLRVADISLLQZ

SEQ ID NO: 3460 - protein, 408 aa, Photorhabdus luminescens
MAKLSSFNIHDPKFIKNPYDFYDILHKQDLVYFEQSQNSYFIGKYEDVDAILKSSIFNTKPLTALAEPVMGDRVLAQMEGEEHACKRKFIMQGLSRDYFNRYYEPMIRKITEDLLQPYMEKGNIDIVNDFGRDYAVLVTLSILGLPSDNYRDIAEWHKGIASFITQFDQTELEKMHSLECSQKLIRLLKPIIDQRRRNPSKDIISIFCQDTAMSMSEITALCLNILLAATEPADKILAMMLNHLISNPSMLDVVLKDRSLVRDAFEETLRLTSPVQLIPREASEDVTISGIDIPKGAVVFCMIGAANRDPSVFHKPNEFDLYRRKNTTSPQKANRKRHLAFGAGTHACAAAAFSLSQLEVSSNIILDLLHNLRFADHYHYQETGVYTRGPSKLLLSFDPIASSAIKEZ

SEQ ID NO: 3461 - protein, 252 aa, Photorhabdus luminescens
KKCLKETNNQILSAHSTLLHENSPSFTVQGETSRCDQIIQKGDHALIGISPFNSRFSKDYVVDLIQWSSHYFRQVDILLPCEREASRLLVASGIDNVKAIKKTHREIRRHLRNLDYVISTATLKSKQIRVIQFSDFSLNHDYQSLKTQVENAFNESESFKKSCLDMSFQAIKGRLKGTGQYFGQIDLQLVYKALPYIFAEIPFYLNTPRLLGVKYSTLLYHRPWSIGKGLFNGSYPIQVADKQSYGIVTQLZ

SEQ ID NO: 3462 - protein, 308 aa, Photorhabdus luminescens
YMSSYNGVIYGVIFCLISAAFDVFVAYLTQSINSAIVIFYCFISSTLLFMMISIFKGIDQLIVKVRKNTLLVLIVNISILLNWGGLIISLRFLEPAIVGVASVACGPAITILLSSFIDKNEAKTEKLEVVISWLVLIGVGVMLVNVFLGNSGLSSTSTQDRIIGIVSVIIGAVGTVLYTIFSKKLFKEKWQTYEILSVRSILMVILSFCYISLSDVSLSLNIDMILPMLILVAVGHLLPIYLVLKAINAITPLHVSLLFLLIPVFTILFQYLDSRIAFSVESLIAASVIVSLLIILGVSKIKKTNRVZ

SEQ ID NO: 3463 - protein, 536 aa, Photorhabdus luminescens
MTTFSKRAKLLKLGVSLVALAVTASVQAKTLVYCSEGSPEGFNPQLFTAGTTYDASSRPLYNRLVEFKTGTTEIIPSLAERWDISDDGKVYTFHLRKGVKWHDSKDFKPSREFNADDVIYTFMRQKDANHPYHKVSGGSYEYFIGMGMSEMINKVEKVDDYTVRIELSRPEAPFLADLGMDFASIMSAEYADKMMKAGTPEKVDLNPIGTGPFQLVQYQKDSRILYKAFKEYWGDKAKVDRLVFSITPDASVRYAKLQKNECQIMPYPNPADIARMKQDKDIVLLEQPGLNVGYVAFNVIKKPLDNVKVRQALTMAVNKDAIVEAVYQGAGQKAKNLIPPTMWGYDNDLKDYQYDPEKAKQLLKEAGMGSGFTIDLWAMPVQRPYNPNARRMAEMVQADWGKIGVKAKIVSYEWGEYLKRAKDGEHQIVMMGWTGDNGDPDNFFATLFSCAAKERGSNYSKWCYKPFEDAIQPARIVSEHAKRVELYKQAQAVMHEQVPALIVAHSTVYEPIRKEVKGYVVDPLGRHIFSNVSLEZ

SEQ ID NO: 3464 - protein, 340 aa, Photorhabdus luminescens
MLQFILRRLGLVIPTFIGITLLTFAFVHMIPGDPVTIMAGERGISAERYAQLMAEMGLDKPLWQQYFHYVSNVLHGDLGISMKSRISVWEEFVPRFQATLELGICAMLFAISVGIPVGVLAAVKRGSVFDHTAIGLSLTGYSMPIFWWGIMLIMLVSVQLDLTPVSGRISDSVFLDDSYPLTGFMLIDTLFWGEAGDFKDAVMHIILPAVVLGTIPLAVIVRMTRSSMLEVLGEDYIRTARAKGLSRMRVIVVHALRNALLPVVTVIGLQVGMMLAGAILTETIFSWPGLGRWLIDALQRRDYPVVQGGVLLVAIMIILVNLIVDLLYGVVNPRIRHKKZ

SEQ ID NO: 3465 - protein, 300 aa, Photorhabdus luminescens
MSQVTEPANSAPKIMTPMQEFWYYFKRNKGAVAGLVYIVLMLLVALLAGVLAPHGAAEQFRDSLLTPPAWQEGGNWQFILGTDDVGRDLLSRLMYGARLSLLVGCLVVVLSLLMGVVLGVLAGYFGGVVDIIIMRIVDIMLALPSLLLALVLVAIFGPSIVNASLALTFVSLPHYIRLTRAAVLVEVNRDYVTASQVAGAGSMRQMFINILPNCLAPLIVQASLGFSNAILDMAALGFLGMGAQPPTPEWGTMLSDVLQFAQSAWWVVTFPGVAILLTVLAFNLMGDGLRDALDPKLKQZ

SEQ ID NO: 3466 - protein, 222 aa, Photorhabdus luminescens
MYTGIVQGKEKVLSLEKKEGFSTLTVSNNNHFFDDVSVGASVAINGTCLTVTQFKNDIVWFDISDFTADVTTLKFLNVGDEVNIERSHQMNKENGGHSLYGHIEGAAEVVDFIKTGETYRLVINIPGDNIKYFFHKGFIGLHGCSLTINGINEEEKTIELNLIPETLRATNLGNIKVNDLLNYEIDQTTRTIVDTISRSMNAIPYGFQDASRRQGSESPGAZ

SEQ ID NO: 3467 - protein, 327 aa, Photorhabdus luminescens
MALLNVEKLSVHFGDEEAPFRAVDRISYRVEQGQVVGIVGESGSGKSVSSLAVMGLIDYPGRVMADKLEFNQRDLTKISEQERRQLVGAEVAMIFQDPMTSLNPCYTVGFQIMEALKVHQGGNRRTRRQRAIDLLTLVGIPDPASRLDVYPHQLSGGMSQRVMIAMAIACRPKLLIADEPTTALDVTIQAQVIELLLELQQRENMALILITHDLALVAEAAHHIIVMYAGQVVESAKASEIFRAPRHPYTQALLRALPEFATDKSRLASLPGVVPGKYDRPIGCLLNPRCPYANDHCRQVEPELRTVGERQVKCHIPLDDAGRPTVZ

SEQ ID NO: 3468 - protein, 340 aa, Photorhabdus luminescens
MSEYLYPAQQISTVPLLKATDLKKYYPIKGGLFSPARTVKALDGVSFELEKGKTLAVVGESGCGKSTLGRLLTMIEKPTDGELYYQGQDLLVPNKDSEKLRRQKIQIVFQNPYGSLNPRKKVGQILEEPLRINTKLNAQERKEKVLQMMEKVGLKTEHYSRYPHMFSGGQRQRIAIARGLMLEPDVVIADEPVSALDVSVRAQVLNLMMDLQQELGLSYVFISHDLSVVEHIADEVMVMYLGRCVEKGSKEMIFSHPRHPYTQALLSATPRLNPELRRERIKLTGELPSPMNPPPGCAFAARCRRALSVCTQFQPKLNQYGDQLIACFAVDQDENVTVEZ

SEQ ID NO: 3469 - protein, 238 aa, Photorhabdus luminescens
VKMKLRVKRSLTIKQMAAVTGVTLVTIAIFITIQLCHFIQQRKDDYISQLNNAAVQVQAPLTEALLNSDLSKAKELLIGLRTVGILGRADVVLPEDIRVIRLSFATHRPIPELAKRVFGIPVEVSIPLHVYGSVSTDAKPLGHLILQVDSNRVYRFVINTLALMLTTYLLLALILTVSISWCINRIIMHPLRDIARDLNNAQLSEPMACPKYHQDDELGLLIRGYNRQFDKHKPPSSZ

SEQ ID NO: 3470 - protein, 497 aa, Photorhabdus luminescens
MQGTKIRYFIGGIMLAVAGQTQAEALQPDPAWKQGKLENGFNWQILQTPQRPNDRIQLRLVVKTGSLAEKTQQTGYTWLIPKVVLFSSKSLSSTKLEQLWNSAIDPKYPLPPAIVSYDFTLYSLSLPHNRPELLKDALNWLADAAGKAVFTPETLQHAMKMADTSVATYPPDIQDPVWRRRLKGSTLLGHDPAQNAPQPIDLEKLKQFYRQWYTPDMMTLYVAGHVDSRTLPENISLAFSSLKGKRHTPATIAALSPMKPETIGIISDKKKEDTLSLIWDLNWQPINDSHVLNHYWISDITREALYRYLQLGLERKNDKALKLGLDCKVQYHRASCALNLNTTAGNLKPAMEYLAAELVTLRDKGLPKGQFDELYAQKQAQLSQLFAMYAHTSTDILINQRLLSQQSNVVDIAPEQYQRLRQAFLASLTPEMLNRELKQILSQEVAFILIQPKGEVEMDVDQLRNSFNQIMSLTPHKDKVDIPAQPPMSKSEAKASZ

SEQ ID NO: 3471 - protein, 350 aa, Photorhabdus luminescens
KYCIMRLLIFKQGNYLRLCMPKRTEKQETTQHQPKRLSKTPLEKGIRHGKKAISLTVRVGNYIRTIPIIAHFIRATLRFNDRMGNQFGAAITYFSFLSLIPILMLSFAIAGFILASNPDLLARLINSIANSISDPTLANTLKNSVDTAIKQRTTVGLTGLAIALYSGVNWVSNLRQAILAQFHPVWVRNQEDNEKIYFKYFRDSISLIGLLLALVITLSLTSIAGSAQATIVKMLGLDGIEWLRPSWFLIGLAISISANYLLFLWLFWVLPRHQPERKALLKGTLMAAIGFEVIKYIMTMTLPRLANSPSGAAFGSVIGLMTFFYLFARLTLFCAAWIATTDNNHKNTEZ

SEQ ID NO: 3472 - protein, 320 aa, Photorhabdus luminescens
YFRKKTMDCLPEQGRRGEIRVIPDLFIHHLPQPFYRVQIRAVWRQVMKLNIHHISPVFHLPASVVTGSVKDNMNLLTDRIGLTDGNEELGDVITVDTVILAYYRFANIGQIQGPHQVQTGTASRGFHCGFLPFSHPAISQFRPLRGMDAINEQDRLMVSGFLLEFPVGFHKGPLLLRVELVWHAGRFFITKSIMVQPFIHAGNSVTDIPRFFDKADNSLCGGQKIRGQISDKCLSLCFAEMALRAAIFGLDFAVIKVITDMTINGRFMKTQGLSDHHRTPALRGQQDRFDAITLSLITAGVMEVFKFGFLFIGNEYFHDZ

SEQ ID NO: 3473 - protein, 358 aa, Photorhabdus luminescens
NCLIFAQMKLMVSVMKIFITDEQKAELEHLHHTCRDKRECDRIKAVLLASEGWSSVMIAQALRLHETTVNRHISDYLNHRKIKPENGGSQSHLSETQTQALIAYLTANLLPTTQAVIRLVKEAWDISYTVPGMNKWLHHNGFSYKKPTGVPHKFNAEQQRAFMETYGKLKQEAGDHEPILFIDGVHPTQGTKLAYGWMRKGQKTAVKTTGSRTRLNLMGALNLADISKTVVREYDRIDSYHIAEFFIAIRETYPVSQKVHIILDGAGYHRSRQVKDWAYVMNIELHYLPPYSPNLNPIERLWKVMNEQVRNNPYFASTALFRQAIHRFFTEILPELAGNLSCRINDNFQVMNPASSSZ

SEQ ID NO: 3474 - protein, 478 aa, Photorhabdus luminescens
IIIFAIIFYKEHIMKISPLNFPPINVTIPGNDGYKFHFEGRVTSITQGHVIASGLADFIDVPINWGAGSISGAERNFDIPFINFGDFNIKVDSINSDNIINAIPGFTHEQKAKLESIITEQKELTNKTPQEATKNLAGMTLGELVLYQRYISEFQKSKSEKAIESMNKALNIINNTPEGLTLIDANKYPYDKKHTTNVGIIELTSRVMINSQKNLNNFLNNEIKKSDDFWNEIGNKYQRAVRNLFLYYREMKAKLSRALTTEVARLKRIKEDLEKSRIEINEAIHDGQNTAIPPSVKQLIFAKLYPKEALEIGLFSKGSTNITTNAVRFATQGDEKKGTFTQPKEMQGEGTQVNAFRHMIWQATLAARYGEKIAKHAGDAHEVDPRVDLNIRQFAVLNDADQTIDLLNNQIGRHIGLNSNTTSMKTLALIALEKFHKEGLYVAVKNAHGYEVVKEKISNVQYAYMKSVFESLDENGKZ

SEQ ID NO: 3475 - protein, 183 aa, Photorhabdus luminescens
MVRKSQVKDGRSAAMEPWLIFISMDDFKPRQVMKIYSRRMQIEQNFRDEKSERFGFGLRASYSHGAGRLSVLSLLATLSSVVLWLIGFYAENKGIHLNYQANSIKSRRVISHLTLAENVLRHSPLILFEIVLNKTLKHLAKIYQNMVLIYYADLWGSFSAMQVEIKGYTKKNTFPLRYRCSSZ

SEQ ID NO: 3476 - protein, 203 aa, Photorhabdus luminescens
LFHQVNKVTAMPVREVCHNFFKDALSPFHKYRQNALIDATIALINGASLTLTSIGRFLPGNAHVKHKIKRIDRLLGNEALHRDIPDIFRNIISMLTESLSLCVIAVDWSGYPSQEHHVLRASLICDGRSIPLLSQIVPSCEQQNVTIQNAFLDRLARAVNPKARVIIVTDAGFQNAWFKHIKTLGWDFVGRIRGNTQLRLEKZ

SEQ ID NO: 3477 - protein, 312 aa, Photorhabdus luminescens
QPPARYRMRKGTFVLLATKIHNTKNYPRLFFTLKPSFPFSCTAYLAMTWRWIGTRLKKSGLPAMLLMLLLLSAINQAQAGHFVNFQSIDTSLYMQFENRVDPRKTISPILEAFGDYSIGDMYVYSIWQNSLQSDYQGDKSTYYYKFVPRVSLSKVTGNDISFGPVKDILFAQWVAKTKGIDYDYFPGISIDWQASWISWLRTIFYFENNAKGSWNDQRIHIDYGIPFNNRLGDFRVVGTFDYTLGLHGQPETIDFKPELHYDLGKRLGNQPGHLWTGIVLNPIKNKYKIRDTPYYRTDQFSYGVFIRYSFFZ

SEQ ID NO: 3478 - protein, 1481 aa, Photorhabdus luminescens
MKNKKFRLSPTGKLAASMAIILVSCSTSFASEIVGGGDPAHHPDIFAAEGKATVVNIVTPSSSGLSHNQYLDYNVGQMGVVLNNGLEEGQSQLAGQLAANPNLNGQAANLILNEVISRNPSLLLGQQEVFGIAADYVLANPNGITCNGCGFINTNRASLVVGNPLIEQGNLQGFSTFNNQNSLKIKSDGLIANAILDLIAPKIDNRGSVTAQKEINAISGENKISATGEVIDSQQALTGVLDSYYLGSMQAGRIRLLNTAKGSGVNLQGTLTASDEIIVDSHGNLNLEAAHLRGGNIDLLGNDIEVKGKVSESSYSRDGSNNYQSYFSGSYTNDSKSSQSLARTKLEGKNISLVANSNNRVTATDIVGDDVNLSGANLTLDGQQLKQSTKNINNQQGYSWRHEVTQESEKLHQAGNNIQAKGNASLNATEGDVKILGSKIDAKGELAVTAKKGVQIAGLTETEKSAETGYKKNHTAKLQTGSWEESKQTERLIASELQAGTNLNIKAGTRAEILGAKVHAGQNLTLEAGKQLQIDVQKTADSRAVRDDKKYWGGIGGGENKDNSELKETNHASELTANGRLLLSGNEGIAITGSKVKAVQGAFVNANSGELTIDNAVSHINRKVDERTGTVLNITSGSKRNNSQQQKSHGSELVSEADLKLLGDEDINIIGSRVQSTGALSLNTSGNIKVLSYGEQKQVDKQSTSLEPQSHFQPKGDKQYRAGIGIEHTSNSQKNQTVTQQASTLSGGSITIDADKDVTLRGSNLVTTTGDAKITGENVHLLAEDNKKSEEKSQSKKYVGAYLTGGIDKVGSGIYGRYEGNNSNHTSTTAVVSGSQIAGNLNIKANGELVQEGTKHEVNGTYTAEAGKVSNLAVSNTESSTNHKLQVGTDIGVNVDYSAVTRPIEKVVKEPAKSALDGTLTKKGTPNFGADIAANGSSIQTANKKSETVVTSIQASDIVIKTNGELYDQGTQYRADKGNVTLTAGNHTSEAAQNHHQSSHSETSGNADLRVYTTTGEDISANGKGKGGTQSSHTTTTTAVTSRITAADDINIRVERDAEYQGTSLNAGSGKANIDAKGDIRFDNATNSTTKTATGYNGEASAKGGNSPEGKNVHIGLGGGYNIDSKNSTTAQVSEIGGKQSVTLSAGNNLTLQGAQVTGKQIDLNAKQGNVELVSAQDRINNDGWEFNLKGNGGNASSIKKAEDDSTTTTTKQNFGGEVKVGIDRLQATTQRNSHIKGENVVINSGGDTTVAGARIEADQVKGSIGGDLQVESRKDTEHGLNVGVDAGMNYTKESKVKSDDIPKDESTKDDFSKDDVSNDEELKDDPSKNPTEEPQPKGWQERLTSTFNSLNNIKGINGVTGKLKSNVDIKDRENVGEQSVISGNQGVNLDVKGNTHLIGGQIGSEKGHVILNTQNVEQQSVTSYDNSKGGNVALPDSVSGIVKAVQEGVLSGKIPLVKTYSNETETSTTNGEIINRKSDZ

SEQ ID NO: 3479 - protein, 556 aa, Photorhabdus luminescens
MIKRISILILGCISFQIIASPAEINDNLPMTEARRTLQDSSREINQLIEQRRYQQLKQQANTVPESTPAPVLPESKQCLPLTGVYLKGISLLSVRDLSTLSALSPACISSHDINRLSHELTHLYISKGYITARVQFIAPNTDGELGLNVIEGFVEKIEGGDRWVNSSMLFPGLEKQPLNITQLDQGLDQANRLQSNKTTLDILPGTVNGGSVIKLHNQRSKPWLLNIKTDNYGQKSTGKWRVRTNTSFDSPFGLSDFISLNASSTLDSPSNRYSRAYTLLYSMPYGAATFSGFGSYSQYASRPHLQMRTIKIYGDTQQIGMRSDFAFYRNQSQINSVSGQLTYKNYNNYIDNAKIGVSSQTLSVFELGVNHLHIIPTGLITLNLSVEQGLPWFGAQTGTAYLDKQFTKGKLMVNLHQRFMLFNSPYQLNNLFYGQYNRHGLPGVEWLNITDRNAVRGFSKNTLSGDNGWYLQNTLSRTFPLANSTLSMRIGIDTGRVQGYRSPQGWQSSAGISSGTTLRYQRMVFDIETSRGKLLSNRQASDEPIQVLVRFSYTFZ

SEQ ID NO: 3480 - protein, 549 aa, Photorhabdus luminescens; identical to SEQ ID NO: 1121

SEQ ID NO: 3481 - protein, 243 aa, Photorhabdus luminescens
MNINRPYALPYNFHKLDVDPHFVAEICELINKISGFSLFSLLLKARFPISNREVYFFNNYHESWRDLYIEKKYWMIDPVLNFRPVPPSFSKIWDLDFFSKSNGQELWYVNQKYGFRSGITFGLPAFSGTYGIFSVAGKDGPIDNETMYKCSGEILGVYIRIIRYLTSHTKYLQSFYIDETSFSNRELEVLRYTADGMTSIEISSTICVTKSTVDFHLMNIVKKLDCKNKFQAIAKAALLGYIZ

SEQ ID NO: 3482 - protein, 356 aa, Photorhabdus luminescens; identical to SEQ ID NO: 52

SEQ ID NO: 3483 - protein, 295 aa, Photorhabdus luminescens; identical to SEQ ID NO: 404

SEQ ID NO: 3484 - protein, 237 aa, Photorhabdus luminescens
NMVWSSIYNKMWESKLMNYYVLMNDYNSSLMPRYLHAIVDTENQINEKWDYEGSRHDIPYYLLDKECPNTLYLLCNKNIGKLWFNYYQHNMAHILSDRFFDIINEFKLSDHVLKKLIATSIKDGKTINNSLNYLFFTDKELFLNEKYSILEKDKYGNLIPHKLSFHNESLNYDIFSIRTTLLAGFIFISEKVANRLIKENIKRIKLIKLDEVLNHYCVDFKYDIKANVKKGKIKLPZ

SEQ ID NO: 3485 - protein, 461 aa, Photorhabdus luminescens; identical to SEQ ID NO: 1083

SEQ ID NO: 3486 - protein, 300 aa, Photorhabdus luminescens
TAMREPPENLIIRAGGNPMTLPAFTAIREEINKINHPSQPAVNWPLIESLALTLFRSHGVDLQSAIYYTLARMQLSGLAGFTEGCELLAGVMVSQWDDLWPPQPAVRTDLLDWFNTRCGHALRQHDYTARDLRMIYRAERALQLIVDRLQQSDLKRLPKVDNLLWFFQNTAKKLEQTRILPKPAAKPVQMPPLVYLAGTEPAPSEPDTGDDAGYAPSQPKVQVRFPEPPPRPMSALQGFGLGLLLGAFVLTGTWLGFYRPLQQQFTALTDTCLSYTNILTRPRVIELFPHRLISIKNTTZ

SEQ ID NO: 3487 - protein, 346 aa, Photorhabdus luminescens
YSLPLIQGVRQSELTEQAAGKRVVGFIHVETVGHVAPVHREPHIKRILTYVSQFAAVNQAQLGPRAGEADGARRFAAGIRYQCELAFHPGPHRVGPDEVHNAAAAVGVIEQLAVEIEQAAAFIAGQAEGLNGILDPQTVLRREEGVADTVGPFQLFQHIRADKLLAVRAVGQVVFHKRFQVLLIEGIQRAAGPEEPPELTERHLLRRVRVKRIAAGQVGLVLSDDGVVPFDFQRTDGFPHHHPPGLFRQCADPAVERCRQGFRPLLYVENRVVVMLFKPLLNGIQGGFPRDRRVLNAQQVTVQGRQLLINPLQGAVFVPGLLQHRGFRREFPVNTHPQAVIRGITZ

SEQ ID NO: 3488 - protein, 466 aa, Photorhabdus luminescens
EIPLIIERINLVMGSLFDIVFSDIGIKYQKFSDGLYPDGVKMPTQHDQFGRTYQWLLLILLGLVYFLVTATTFTSLGVVLPSMIKELHWSWTDAGLGFTLLGLSCGLSSYLPAMFIRRTGVRATLIIGTLTFITSFYILYNTHSIAAYFTGTTLLGIGFSLMATVPGTYVISRLFKKQSLAFGIYFTIGGLGGVVGPWIYFLATVFWENWRMHWAISGISLTLISLLTILFMREGKKENAHAERISKNQQDQLPTSIYRTKEIWNVRQALHTWQFYAIAAAYTSFLLCGITVNSFAVAHITENGFSESVAASSLSILAFINAFSRFAGGAVGEWLDPKKLLIGSLSIIICGLIALSATTSWTFLILFTLCIGIGYGMTFLASSILLFNYFGRTPYLELFSVMNLISTTACIAPFLVGAIKDYSGSFTPAFLIIAIPVLTILIITFIMQPPLQIVKKCSDNSTLLNZ

SEQ ID NO: 3489 - protein, 1183 aa, Photorhabdus luminescens
PMNWLSLLLNNIKKPARPRLPPLKATASLILALLPCLALIWLWWWGPGWQFKQTHPLDTLSARWLATVIILLLALSVVGIKIWRRLRQLEKLKLEGELNTVDPVRADITRQDRYLHHWKAQLQRHLGTRDYLYQRPWYLVMGNTGSGKTALIQAGCRLTDIAAPDTLSGEEALPLHLRCWLGEKAVIIDPDGFLIDQISPPDTGKPQLPARLWQALLVWLTENRQRQPLNGIILTVDIHRLLTDNKAQRERVIAALHLRLQDLRLTLHHPLPFYLVLTKLDRLHGFSAAFQSLDSAQRAQILGVTFSLNARDEQSWRTELAQFWCQWMQQLNAAMPDMMLNKVDISQRSPLFSFTRQIQGLHSYLVPLLEGLLDNGGPAQPGLRGVYLTSSQQIGRIDDLFTQSAAVQYHLGPQAFPTWPVADTVPYFTHALFEAVLLAEPNLAAENRRWLSRHRHTLLTFSTAGAGVVLALWSGWHYYYQQNYRAGDEVLAQANIFLSVPPPTGEDRLGNLQLPLLNPLREATLAYGDYHQKGLLADMGLYQGAAVGPYVENTYLQLLSQRFLPALMNGLLDDLNRAPKGSEEKLAVLRIMRMLEDGSGRHKSLVEHYMQARWSQAFNGQRPLQAQLLTHLDYALDHTDWRAAREAGDQAAISRFAPYQLPLINAEKELSQLSIYQRVYQNLRIKAQDSLPPPLNLRDQIGPGFDRLFMANNDKQLIIPQFLTINGLNNYFVKQDDQLIDLTVMDSWVLNLSHNVQYSDTDRQEIQRQITEQYLGDYTATWRAAMNNLDIRDFTDIPQALSALEQVISGEQPISRALQILSDNTRLPEINETLPAKARQPLRDTPDYRLRVRIHREFAPETAVLEESGDKNSTLQGVYQQLAALHRYLLGIQNAPVPGKAALNAVQQRLEQHNDDPIFDVQQRAKTLPAPLNRWVGALAEQAWRVVMREAIRSLEIEWHDTVVRQYQTYLAGRYPFNPDATEEVPLSEFGRFFRPGGTLDAFYQQNLKPFVENNLTHRADGQQLIRPDVLEQLKRADRIRDTFFSPQNGLGVQYAIEPLSLTGNKRRSLLNLDGQLLDYAHGRSSIVHLIWPNAMRAGVESQLTLIPDAGGKSPRAIRFTGPWAQLRLINSGKLTNVRQDSFDVRFTVDGGDMTYRLYVDESDNPFAGGLFSQFRLPDTLYZ

SEQ ID NO: 3490 - protein, 251 aa, Photorhabdus luminescens
YYITRLTQNKEIYGYLYSYLLYTVTHLTTAPMANGTGKTPLAPTSADRTADYLAKLPAADNALLQQIEQSLTLAPYWLDGHAIAAQAAGKLGYHAVADAIRDELRAFLDRLPVLQNLSFSDMSPFISDATLNWLHPPATATVSSGTTPEQDAVWHCFQQHGLEAALHAAEQYQQHLTEPRDQFYGQLLTAQLLEQAGMHALAQQHYRQLRQAGQHLSLADWEPGLLAALAEKAPMTAPAKTTTANRSVNPZ

SEQ ID NO: 3491 - protein, 479 aa, Photorhabdus luminescens
MKEFFSYAQDLHEKSKLLQQQKLASDKKLMGQLFESYDQKTIAELLRRVNYNDWTRETLNRWFHGKSVQKLLTEVEVAMLQKMLPEPPKNHPQYGFRFIDLFAGIGGIRKGFEEIGGQCVFTSEWNKDAVRTYKANWYCDPESHKFNSDIREITLSENSKIDEKEAYKNIDKEIPDHDVLLAGFPCQPFSLAGVSKKNSLGRAHGFECDTQGTLFFDVARIITAKKPAIFLLENVKNLKSHDKGKTFRIIMNTLNELGYAVADADIMGPNDPKIIDGKYFLPQHRERIVLVGFRKDLNIHQGFTLRDISRYFPKERPTLADLLEPEVDSKYILTPNLWKYLYNYARKHQAKGNGFGFGLIDPNNKDSVTRTLSARYHKDGSEILIDRGWNKKLGEQDFDNPDNQENRPRRLTPKECARLMGFESPQGEAFHIPVSDTQAYRQFGNSVVVPVFTAVAKLLAPYIAKAVKQQQINKDQAAZ

SEQ ID NO: 3492 - protein, 445 aa, Photorhabdus luminescens
WTGQKMTNKLINIDKISVIMKDLGAKKIIVKPLANNDNSKQQIYLGADFSVIQGIPVDELKSAGMSKKGARFKATLNLFWINTDSCKEQAHGSQIILYPNYPEIRLSGIINGCSIAPSHLMQPPTKEERINRCDKNRYLILGICKDMVFAYMSSWEDALSIELRELIDKNLMNPVFSVFYEYYSNIKDSRSDLITRLKEIYSYGFIKSQRLDKNGNVIEYRARNGAGFTLESLFGIIPNGRSGPDFSGWELKAHSGSVVTLMTPEPNKGEYIENLHKFMSDYASSKKEDRVDFASIHKIGLLNEKTKLTLYLEGYDFDKKKIIDPDGGLVLRSINGNIAAGWNFGKLLDHWKRKHSKTCFVSYDVKNGDFPYYKFGPQIVLATGANLNKFINALESSKIYYDPGVNIKYQEGLSKVKKRNQFRIKWKDVLSIYDKAESLDLNENZ

SEQ ID NO: 3493 - protein, 356 aa, Photorhabdus luminescens; identical to SEQ ID NO: 52

SEQ ID NO: 3494 - protein, 237 aa, Photorhabdus luminescens
NMVWSSIYNQMWESKLMNYYVLMNDYNSSLMPRYLHAIVDTENQINEKWDYEGSRHDIPYYLLDKECPNTLYLLCNKNIGKLWFNYYQHNMAHILSDRFFDIINEFKLSDHVLKKLIATSIKDGKTINNSLNYLFFTDKELFLNEKYSILEKDKYGNLIPHKLSFHNESLNYDIFSIRTTLLAGFIFISEKVANRLIKENIKRIKLIKLDEVLNHYCVDFKYDIKANVKKGKIKLPZ

SEQ ID NO: 3495 - protein, 1478 aa, Photorhabdus luminescens
PDRRNTMSLGDEIVTRIARVGARHAVHVSPPQGSPGPAAAREGDPIKHASFLGALAGAITGALIGAAVFAAASALVGLTILTGGLATVAVIALGTAATFALGDVISAASSAVTNMVDSIGPPSGTLTSGSPNVFIEGQPAARATTDIAVCSKHPAPPLIAQGSETVLINGSPAARVDDKLACGATIKSGAKTVFIGSGQGTYLAVADEFSAWERAILIAVEFLVPPSRGALKGLGKLFTKPGQGIQGVLKGAKAGAKKAKALLSNRISCAKKAFRETEGAKRYREATKKFFTGDPIDVTTGQLFDQRTDITLGQTLPLVFLRSWVPEEQGLLGPGWTDSFSECALATGDRVEIRTTEGASLYFALPAAYTHSVNPDHPDFTLSRGEQGYILRHRDSPVSKYFTLPHPSSASKEAPRRWLLTEHRDVYDNRLRFIYNKHCQLTQVLHSDGPELTLLYNLRGQLTEIRRTDERLQEVMARYHYHDNGRLAEADSTQNFHLYYEYNAQGLISRWSDGDQTWVDYRYDKQGRCTDSVGAGGFYPVHLDYAPGITRSTTPQGHTTTGHYNDQQLITEIHTPCGGVTRYEYDRWGNLVRQILPEGETLTLTYLADTGRVTSLTEATGAVWQYSYEADSLQLTGMTDPLQRTWLPQYDEQGQPAGFIAPDGRKTTLTRNAFGLVTSETDPDGNSRTQEYDKHQRLVRVLDEENRTVSLGYDSQDRLRSLTAAGALWRWRYDRHHRVAVSDRPDNQLEHFTHDRHGNLTCWTDARGVKWQVEYGPFDLPVARRDGEGHRWQYRYDADTLQLTQVINPQGETYSYTLDADGRVITEQDYAGTQWHYRYDRSGNCIEKRDGEENVTRYDYDAARRLTTLHTPEGPTRYHYDSVGRLLTVDSPDSTLHFEYDGQDRIVREIQPHGEIQRHYPDNRTAERQLLTGETAPVTGPARFSGQTHPGRWQSRREVNRVGELITLTLAGQAPLTIERDDAGRDTGRYVDGGFILRQQYSLMGQLTAQRAGRNPYFFRPAEPDEIEGPAYAGVARRYEYDTALNLTAASDDGQQVNYLLNGNGQVISVGEGRTLREHYQYDETGYPSRRFDGVQEIMGETLYQEGHRLNWVGSHRFVYDRAGRMQEKQFLAEGCRLALTKYRWNSQNQLTGLITPDGIPWEYRYDAFGRRTEKRCIQSGKLTTYLWDGNVPAEIREYQHGRLKMIRHLVFDGWELVAQQTQAFTLNLDNRVELMAGEVQTQYAVSAPTGEPLALFDPAGKRVWRRPKQSLYGLRLGGYGENPQLDPGLRFAGQLFDEESGLFYNRFRYYLPEATCYLSPDPTGLWGGENTYRYVQNPTKFIDPLGLAGENVFIHYTNKAGFDGIMKSGVLHPNVSGKVYITDVLMSPKDVMRDLLINNPNHIGRGDYAIIFKIDPGERGNIRSPSRLEYTHEGKLKLNNILYAGKNPYAILEHLDYDTRLKLTDNQVKIRKCGGKZ

SEQ ID NO: 3496 - protein, 318 aa, Photorhabdus luminescens
RGRAPVLIISNEGKVVAHHGAALPGGLFQRLRLTAMMGDADQLPAPVEVRPGMAGQGEQHAGLHRRGITVTVAGQGIVAQRFQPVAGEISAVLFVFEAAGKIEMFIAGMLEVLFPHLMTELRRPGRVFEGVIFELDHRRPYLRLAGQPGNAQLPGLFSVVGVIGQHRAFDDRARIVGKHQGVFIAGEFKEVKNPFFGGEALQKVKIGFAVLDAELPFRVRIAQAERHIPDAVLFKQGGEDGFDILLLKNPGILAQGGAPHIGPDGHVIAGLMFAGIALDKAGDHAGDGALDFAGAQDGQGGALVEDGGEINRRVGAGZ

SEQ ID NO: 3497 - protein, 612 aa, Photorhabdus luminescens
LSPQSAGGLQFTLTAGGLPPHTFVVAGFTLHEALSTPFTLTVSLASADPAIDFAAVLDQSATLTILRAGKVERTVTGMVASFVQGNTGKHQTRYDMTIRPDMWRTTLRQNARIFQQQDIKTILTTLLKENGVRDVAFSLRNPHPEREFCVQYRETDFDFLQRLTAEEGIFYFFEFTGNKNTLVFADDAGSVVKGPVLPYHPDDAEQARQLCITRLTRQAQVRPAVVELKDYTFKNPAWAAEFRHQMREQDLQHTGYEHFDFPGRFKDEQHGADFTRYRLEALRNNALTGDGDSNAATMQPGVLFTLTGHPRPDLNRCWQLVGVTHHGSQPQALEQAAGESGTVMRNDFTFIADNQHWRPAPLPKPAMEGPQIAKVVGPAGEEIYCDAYGRIRLQFLWDRYGRSNDSSSCWIRVTQPWAGQGWGMLAIPRIGQEVVVDFLNGDPDQPIVTGRTYHASNLPPGALPGSKTQMTFRSKTHKGDGYNELRFEDAKGSEALALHAQRDMNTVVLNNRETRVMNDHTESIGHNQMLSVRNDRHKEVTGNEVSAITGLRQITVEKDSLLNVKNNIQIQARAGGIEIATAGGSITIDNAGNISIQGANITINGKQVNVNZ

SEQ ID NO: 3498 - protein, 371 aa, Photorhabdus luminescens
NEPIRYSLPQTNKEFIMAKKEFGVFLPIAKGGWIISKNTPPLDASYQQNREAAILADQIGLDFIMSMSKWRGFGGETEHWGCSLESVTMMAGIAEVTHHARLIATMHAGLHNPAVTAKMIATLDQISHGRAGLNIVSGSFKDEFEQMGEWDNNLDHDQRYAMTEEWTQLIKRLWSEKQVNHQGDYFNFKNCVSEPKPVSVPRPYLVCAGQSECGLRFSVRNTDVCFIGGKDEEETRQISLMAKRLAAEYGTTTKTFCMCTIICAETDEEAKTLAEFYRDGLDIDAVKSMMHSFGVDVGEKSNAMVERSQNAFMTHTAIGNPETCRQQLSDLLRECELDGVMLIFPDYVQGLTTFGEKILPQLRAEFIYTQZ

SEQ ID NO: 3499 - protein, 226 aa, Photorhabdus luminescens
ERQEPPPRPMSALQGFGLGLLLGAFVLTGTWLGFYRPLQQQFTALTDTPDGARLAWLSHPDLTTYARQLTRLADTSPLVVLQQAEQLTDRAQKTWPQDRRQQRETQRWQQLQSIRRENAPVSGSWQQTRHQLQLLADNILTQERNRGSFTLSYLKTAIYQIQHSHNRDVPLEELLRQLSVAVEQGESVSPALIKKTDDRFNALLSQYYALQQAAGLTALPEKNRPZ

SEQ ID NO: 3500 - protein, 461 aa, Photorhabdus luminescens; identical to SEQ ID NO: 1083

SEQ ID NO: 3501 - protein, 241 aa, Photorhabdus luminescens
TAMRERPENLIIRAGGNPMTLPAFTAIREEINKINHPSQPAVNWPLIESLALTLFRSHGVDLQSAIYYTLARMQLSGLAGFTEGCELLAGVMVSQWDDLWPPQPAVRTDLLDWFNTRCGHALRQHDYTARDLRMIYRAERALQLIVDRLQQSDLKRLPKVENLLWFFQNTAKKLEQTRILPKPAAKPVQMPPLVYLASTEPAPSEPDTGDDAGYAPSQPKVQVRFPEPPCLLIRSPNQLIZ

SEQ ID NO: 3502 - protein, 346 aa, Photorhabdus luminescens
YSLPLIQGVRQSELTEQAAGKRVVGFIHVETVGHVAPVHREPHIKRILTYVSQFAAVNQAQLGPRAGEADGARGFAAGIRYQRELAFHPGPHRVGPDEVHNAAAAVGVIEQLAVEIEQAAAFIAGQAEGLNGILDPQTVLRREEGVADTVGPFQLFQHIRADKLLAVRAVGQVVFHKRFQVLLIEGIQRAAGPEEPPELTERHLLRRVRVKRIAAGQVGLVLSDDGVVPFDFQRTDGFPHHHPPGLFRQCADPAVERCRQGFRPLLYVENRVVVMLFKPLLNGIQGGFPRDRRVLNAQQVTVQGRQLLINPLQGAVFVPGLLQHRGFRREFPVNTHPQAVIRGITZ

SEQ ID NO: 3503 - protein, 1183 aa, Photorhabdus luminescens
PMNWLSLLLNNIKKPARPRLPPLKATASLILALLPCLALIWLWWWGPGWQFKQTHPLDTLSARWLATVIILLLALSFIGIKIWRRLRQLEKLKLEGELNTVDPVRADITRQDRYLHHWKAQLQRHLGTRDYLYQRPWYLVMGNTGSGKTALIQAGCRLTDIAAPDTLSGEEALPLHLRCWLGEKAVIIDPDGFLIDQISPPDTGKPQLPARLWQALLVWLTENRQRQPLNGIILTVDIHRLLTDNKAQRERVIAALHLRLQDLRLTLHHPLPFYLVLTKLDRLHGFSAAFQSLDSAQRAQILGVTFSLNARDEQSWRTELAQFWHQWMQQLNAAMPDMMLNKVDISQRSPLFSFTRQIQGLHSYLVPLLEGLLDNSGPAQPGLRGVYLTSSQQIGQMDDLFTQSAAVQYHLGPQAFPTWPVADTVPYFTHALFEAVLLAEPNLAAENRRWLSRHRHTLLTFSAVGAAVVLALWSGWHYYYQQNYRAGDEVLAQANIFLSVPPPTGEDRLGNLQLPLLNPLREATLAYGDYHQKGLLADMGLYQGAAVGPYVENTYLQLLSQRFLPALMNGLLDDLNRAPKGSEEKLAVLRIMRMLEDGSGRHKSLVEHYLQARWSQAFNGQRPLQAQLLTHLDYALDHTDWRAAREAGDQAAISRFAPYQLPLINAEKELSQLSIYQRVYQNLRIKAQDSLPPPLNLRDQIGPGFDRLFMANNDKQLIIPQFLTINGLNNYFVKQDDQLIDLTVMDSWVLNLSHNVQYSDTDRQEIQRQITEQYLGDYTATWRAAMNNLDIRDFTDIPQALSALEQVISGEQPISRALQILSDNTRLPEINETLPAKARQPLRDTPDYRLRVRIHREFAPETAVLEESGDKNSTLQGVYQQLAALHRYLLGIQNAPVPGKAALNAVQQRLEQHNDDPIFDVQQRAKTLPAPLNRWVGALAEQAWRVVMREAIRSLEIEWHDTVVRQYQTYLAGRYPFNPDATEEVPLSEFGRFFRPGGTLDAFYQQNLKPFVENNLTHRADGQQLIRPDVLEQLKRADRIRDTFFSPQNGLGVQYAIEPLSLTGNKRRSLLNLDGQLLDYAHGRSSIVHLIWPNAMRAGVESQLTLIPDAGGKSPRAIRFTGPWAQLRLINSGKLTNVRQDSFDVRFTVDGGDMTYRLYVDESDNPFAGGLFSQFRLPDTLYZ

SEQ ID NO: 3504 - protein, 284 aa, Photorhabdus luminescens
AVNVHRQDDAVERLALTVFGEPDEQRLPQAGGQLGFAGVRRRYLVDKEPVRVNDDGFLPQPAAQMQGQRLFPAQGVRGGNVSQPAAGLNQGGFAAAGVTHHQVPGALVEIIPGPQMALQLRFPVMEITVLTGDIGAHRIDGVQFPLQLKFFKLAQAAPDFYPDKTQGQQEDDHRRQPAGRQGVQRMRLLKLPAGAPPPEPDEGQTGQEGQYQRGGGFQGRQTRPRRFFDIVEQQRKPVHGLTLLFAVVALAGAVIGAFSARAASRPGSQSASDRCCPAWRSWRZ

SEQ ID NO: 3505 - protein, 522 aa, Photorhabdus luminescens
RTQTTDDRKNPDHQNRQRKPHDIQHFSTGTGGETFTLRLSLVIPMDIRKQFDWQGLLLTPLSDELISRALDENEPAWEYIDGEMVKLGSLAHSSLNIEEIQRQALQLFSEKSKDFRLMVHLLRTLQHGSHPAELILAMELLADYIPHYWQAAWPHKPQLKRRLAQQVIKRFDAAQPGFCEQADETQREEAQGALAHLAQCWHTDEPALAKEIDQLRPRYARKPQPKPAAAPAEPAETTAPSANTSALTSPPIPDVTVDSAGEKAWKQTLLTVADLLCERQPDSPVGYRLRRYAIWYTLTTAPMANGTGKTPLAPTSADRTADYLAKLPAADNALLQQIEQSLTLAPYWLDGHALAAQAAGKLGYHAVADAIRDELRAFLDRLPVLQNLSFSDMSPFISDATLNWLHPPATATVSSGSTPEQDAIWHCFQQHGLEAALHAAEQYQQQLTEPRDQFYGQLLTAQLLEQAGMHALAQQHYRQLRQAGQHLSLADWEPGLLAALAEKAPMTAPAKATTANRSVNPZ

SEQ ID NO: 3506 - protein, 217 aa, Photorhabdus luminescens
IMNFLLLVSSLIASLTGTPDTQPDQETPTAPSLPALLQCRAEPSPLVRVDCYDRLLDKVDNIAVIPLEKTGPVWRQAMEQEMKRTDHSTGFITTQSDSLPTRVILTTPAIGVPPPRPVLMLSCIDNITRIQIALAKPQDSGTVMMSTEITQFSADWFLRENGYLLESSRGLPGIEELKRLMTGKTLTIKTGNGNRMTFNISQLEQAVKPLRSACRWZ

SEQ ID NO: 3507 - protein, 270 aa, Photorhabdus luminescens
GDTMKQRLKSALALLENDSIEQLVHHFLEVNHQRQRFDALLVSLLNVNENRLECYRLPAPNQISALQLDVNIGDINHPLVQILYKGTPTTWGSLNQGVRIDHRNFRLFVEELPHRCGLHAIPLFNCNGQACGVIAVFAKDVHRFADDSNMFYIYCHVMQHRLKKLQELEQLRDQLRQIRQVFQTQRQKEKQLDELLASLSTTAENKTSASVSHDYSKIDNLPQALEEFECAVLIQRQHIYGNNTKQIAASLGIAPRTLTYKLAKYRCKLZ

SEQ ID NO: 3508 - protein, 811 aa, Photorhabdus luminescens
MIWRWFWREWRTPSLLIVWLSLTLAVACVLALGRISDRIDQSVHYQSRDFLAGDLVLRAAYPVDEEWLQQAKKRGLKLSRQLSFTTMTYAGDIPQLANVKAADSHYPLYGELETHPPGLKAEKGTVLVAPRLLELLKIKVGDNLDVGDTTLKVSGELIQEPDSGFNPFQIAPRILINLDDAPSTGAIQPGSRLTYRYMFSGDKEAVYQYQQLIDPQLKADQRWYTLKQDSGALEKTIERAQQFLLLSALLTLLLAVAAVAVSMTHYCRSRHDLIAVLKTLGAGRWALRKWVIGQWLVILIAAALVGTLLGLMFEYLLVQILAPMLPKTLPVAGFWPWIWALGALSVIALLVGIRPYKQLMATQPSRVLRNDIIAPIWPLRYYLPLAVLVVISGLSLLVGTKPMLWALLAGMMMVALLLAVFGWGGLWLLRHLKLRQLSFRLAVNRLLRQPFQTVAQLAAFSLSFMLFALLLVVRGDLLDRWQHQLPPDSPNYFLINMTGQQIPQVEHLLAQYQVKPTAFYPVVLARLTEINGQSAIAWAEARGSDSNTVQRELNLTWKEELPPFNTLVEGHWPLKKDEVSIEQGLAERLAIKIGDKLTFSGDTQQFSAIVSSIRLVDWESLRPNFLFIFPKQALENQQQTWLTSFHYEGEGRLLTDLNRQFPTLSLLDTGVMIKQIQGILQQVSKALEVMVGLVMVCGALLLLAQVQVGMHQRQLELVVYRTLGASKQLLRRTLWYEFALLGLMAGFTAALGAEVALWLLQTKVFDFPWQPEWQMWLLLPIISSLLLSLCGSGLGLRLLRGTGLHRRVQGZ

SEQ ID NO: 3509 - protein, 882 aa, Photorhabdus luminescens
MIQIDLPTLVNRLNPMTRHALEAAAAQCVSQQQPEITVSQLLLQMINTPLSDVRAIFNQAEVDSDLLKEQLDQMIPHHQAMVQAYPNFSPMLVEWLQDSWLLASTEMQHQELRSGVMLMTLLFSPLRYLTPQSARLLSGINRELLRQNFTQWTAGSAEQPVVENDKNGQNKAAAGSDSLLARFTQNMTEQARQGKLDPVLCRDKEIDLMIDILCRRRKNNPIVVGEAGVGKSALIEGLALRIIDNRVPEKLHNSELMTLDLGALQAGAAVKGEFEKRFKGIMNEINQSSVPIILFIDEAHTLIGAGNQQGGLDISNLLKPALARGELKTIAATTWGEYKKYFEKDAALSRRFQLIKVAEPTAEEAIIIMRGLRAIYEQSHGVLIDDEALKASAVLSDRYLSGRQLPDKAIDVLDTACARVAINLTSPPRQISALKNQLHQQQMESDVLAREQRMGLNQHTDRLDELRQQQQETTEKLAALEASWQQQQQLVQQIIELRRQLLTDETEFTNETKQSETSAEMTTEELIAQLAELNEQLEQLQQQQTLISPHVDKNQIATVIAEWTGVPLNRLSQSELSVVTELPMHLGQSIKGQDLAIQCLHQHLLTARADLRRPGRPLGAFLLVGPSGVGKTETVLQIAELMFGGRQYLTTINMSEFQEKHTVSRLIGSPPGYVGYGEGGVLTEAIRQKPYSVVLLDEVEKAHPDVLNLFYQAFDKGELADGEGRVIDCKNVVFFLTSNLGYQTIVDNADKPAEMHDRLYPELAAFFKPALLARMEVVPYLPLGHDTLKTIIQGKLARLDNLLRQRFNADVTLSDEVVEEILQRATRTENGARMLESIIDGALLPPLSLLLLQKMAAGKQIRTIQLTVNDHQFNAVVEEIPZ

SEQ ID NO: 3510 - protein, 262 aa, Photorhabdus luminescens
EWECLMKTETINGNPIPTQEVTDNAVHLQYQLPLRGESLNPMIDAATPLLGMVMRLKDMGEQPLPDQLYQQVVTDIQAIEQLLQTKGYEPGAIISFRYTLCTFIDETALGHGWNSKNEWLQQSLLVRFHNETWGGEKVFQLLDRLMGEPQRYQHLLEFIYLCFCLGYRGRYKVASQKSDDFERLFRRLHQQLHALRGEAPSIILHNNANERNDRYRLGKRLTIKHLFWSGITLLAIVYSFYAIRLHNQTQNILQQLNNLLSZ

SEQ ID NO: 3511 - protein, 451 aa, Photorhabdus luminescens
MPGKNRVIWREGLFIKPQHFQQQQKHNDYLAHSRQTSLTSYSYGFSSLTLDKDLLALGRISIIEASGIMPDGTVFSIPNQDATPQPLDVVNIHENNSKDIYLALPIANDILNEISHSESNHAGAVRYREYMEDIRDLHTDGGDICQVMLAQLTPVLKQGSEDLSAFSVLPLCQIIEKRPTGTIILDEDFVPTCTSIRVSTQLKNYMDEIDRAMTERGRSLANRIGSPGQQGVADVAEFMMLQLVNRVQPWFTHYAGQAILHPQDFFTQLIQTCGELRTFTHESRQVGNMPIYKHDDLTETFKEVMILMREAMGVVLTPRAIPIKLQTQANGIRVAHIHDRNVLTNAEFILAIRAQVPHDQLLRKFAQQTKVTSAERIREMVSIQLPAVALAALPSAPRQLPYHAGYTYFRLEQQGDAWKDILKGNSIAFHVSGEFPGLDMQFWAVRNGSAZ

SEQ ID NO: 3512 - protein, 429 aa, Photorhabdus luminescens
MEKQQPTLSLRVINSDQLESGKAASCLFSTQGGTVGSSESHLWSVQDQQGNINPSQFTIQWRDDAFCLQMIAGPLFVNQSPLTSGAGFIRLQQADEITIGKLVIKSYISFSDTDRIDPMTVSPESLVSSYSNPLDAMMEKDPAQDSAFTDHGSLAPTIKHDFSHDPLKVLDSENLTTLDQTSVSNEVDQSLQQDHYRTPLFFSSLSDNRGNAMDQDFVDLPGISSPFNEQYQDMEQQHVAITPLMRGLNTQLPLHNSQQANDFLEEMGKTMKAAIEGLLVLQRTQHGLRDKQLRPIEDNPLRLNMDYNTTMQVMFADQKSPVHLSAPSAVAESLHNLQLHYQANRIAITAALNTMLDAFSPEHLLNRFAQYRRSNETQEKDATWAWEMYTSYYRELASSRQQGFEKLFGEVYEQAYDRALRQGLEDSQZ

SEQ ID NO: 3513 - protein, 351 aa, Photorhabdus luminescens
MAGTDRSTCVDVTSENSPQNQILDVSRYNFHQLVELFNQLAVAWEKTGQTNRPDREAIQFKSSASLAFPTRDIVSAKRSKEGRFQVEVSFLGLHGSQSPMPGYYLDSLAWEDAQDENRLTNFLNIFNHSSIVMLHQIWRKYRYYICFDKNGQDDFSQRMFALVGLGSNVNRSHLNINHSKMLAYAGLLASPGRSPEVICSLVSHCFDLPDVTVHGWQIRKIAIEPSQQNRLGGMLKIRGQKQKVKQSVIGKNFFLGSWVRSCNSKFILCINNLSREHFLSFLPDGKNFLPLVMFLCFVLRDQMAWDLRLGLAENQAGGMVLGTKLNNNLGWTSFLGEPEKKPFITISVNGZ

SEQ ID NO: 3514 - protein, 616 aa, Photorhabdus luminescens
MSLEKYFREELDYLRQLGRQAAIEHPHLASFLSEQGSDPDVERLLEGFAFLAGNLRAKIDDQFPELTHGLLHMLWPNYLRPTPSMTIIQYTPDDSAITKATQIPRGTQIKSRPLTDDSENDEDEDNYLSNTNTQKTGQDDHRCTFTLCRDVWLFPMSIRDISVNNSNEQGVIGLNFTSKTELNLQELQLDKLRFYLSGDDYSSTQLYFWLSYYLEDAKLVVGDTTISLPDFDFVPVGFNREDALLPYPKNAYMGYRVLQEYFCFSEGFLFFDVTGIPKLPASLKATDFTLNLYFSEALPPEIKIRQDTFRLHCVPAINLFPMDGEVIRLDGSRDEYPLRASYSHPNRYDIFSIDKVESWLVGPDGKPKLSRDGRRSYVPFESFHHQIEHESELNTRYFRIRIKESPFRKGLEHYISFVRGDESQLLLSEENVSIQLTCTNRELPLQLRVGDIDYPLSGSSSFATFRNITRPSVPLYPLMSGEYHWSLISNMSLNYMTLLDKDALKAVLRTYDLPSRYNRQSSRSSQKRLDAIERIETRQIDRLFKGLPVRGSESTLYIRQQAFCSEGELYLFCNILSRFFALYASVNSFHMLKVINLDNQECYQWPEQTGQHALMZ

SEQ ID NO: 3515 - protein, 493 aa, Photorhabdus luminescens
MSLHEESSTTLTPGSTTSLLDEIMSQARMTPENDGYHIAKQGVAAFISSILDTGTNEEPVNKLVVDRMIVELDKTLSTQVDEIMHAKEFQELESSWRSLKLLVDRTDFRENIKINIIHATKEELLEDFEFSPEIIQSGLYKHVYSTGYGQFGGEPVAAVIGNYAFSNSSPDIKLMQYVSAVGAMAHAPFLSSVAPDFFGISSFTELPAIKDLKSVFEGPAHTKWRALRESEDSRYLGLTTPRFLLRLPYSTVENPIKNFNYQEDVSKDHEHFLWGNTAYLLATCLTDSFAKYRWCPNIIGPQSGGTVSDLPVHLFEAMGQIQAKIPTEVLVTDRREFELAEEGFITLTMRKGSDNAAFFSANSVQKPKVFPNTREGKMAETNYKLGTQLPYMFIINRLAHYIKVLQREQIGSWKERQDLERELNTWLKQYIADQENPPTDVRSRRPLRSAQIQVLDVEGDPGWYQVAMQVRPHFKYMGASFELSLVGRLDKEZ

SEQ ID NO: 3516 - protein, 281 aa, Photorhabdus luminescens
MLSYRHSFHAGNHADVLKHTVQSLIIESLKEKEKPFLYLDTHAGAGRYQLSSEHAERTSEYLEGIARVWQREDLPQELNAYMSAVAALNQSGNLRYYPGSPLIARHLLRQDDKFNLTELHPSDFPLLRNEFSRDNRARVLREDGYQQLKSQLPPLSRRGFILIDPPYELKSDYQAVVQAIQEGYKRFATGVYALWYPVVLRQQIKRLVKELEATGIRRILQIELAVRPDSDQRGMTASGMIVINPPWKLEQQMKSVLPWLHQVLVPEGIGHTLVKWVVPEZ

SEQ ID NO: 3517 - protein, 457 aa, Photorhabdus luminescens
METIRMSKHYDYIAIGGGSGGIASINRAAMYGQKCALIEAKALGGTCVNVGCVPKKVMWHAAQIAESIHQYGPDYGFDATINRFNWKTLIASRTAYIDRIHQSYGRGLGNNKVDVIQGFARFVDAHTVEVNGEKITADHILIATGGRPVWPDIPGAEYGIDSDGFFALEEMPKRVAVVGAGYIAVEIAGVLHALGSETHLFVRQHAPLRSFDPMIVETLLEVINTEGPTLHTESVPKSVSKNADGSLTLQLQNGKEQTVDTLIWAIGREPVTDNLNLSVAGVELNEKGYIRVDEYQNTNVKGIYAVGDNTGAVELTPVAVAAGRRLSERLFNNKPEEHLDYTNIPTVVFSHPPIGTVGLTEPQAKAQFGEEQVKTYQSSFTAMYTAVTQHRQPCRMKLVCVGPEEKIVGIHGIGFGMDEMLQGFAVALKMGATKKDFDNTVAIHPTAAEEFVTMRGZ

SEQ ID NO: 3518 - protein, 375 aa, Photorhabdus luminescens
LSMSIWQSIRKFMGLAEALISIPQSERGGEIAQRGFDYQTCWALSQMLEYELDGKNYVFIFEYHDDVLILDDEYSPTDLTFAQVKTSESHWTAYDLHKSTKRKPISIIGKLFIHHRNFCNYSPQLLFVTNASFNLCEKNGGKSLFSASEIKDEHKISFKQAIKDQVKLDDENIDLSILKFVQSSLSLDDHITHLKGKLCDFLCNKFGDDTTLSVNVLAALLEKECRNKSKVKSADIVDFSDLISRKGFSSRAFNGVLDSLNVSNSMKPDWKMAETIFNNLGKTLFEIIPLKATFSQVCIDLNQNTKNPSTVYLEYAINLYDEASVYSDLKMYVTGIIHKIDALCPDYTLALKSGKKECIVVYSIIQKLLEGGKVZ

SEQ ID NO: 3519 - protein, 229 aa, Photorhabdus luminescens
MVTGNILEVQHLSKHVGQGGHKITILQGVELVVESAQTIALVGESGSGKSTLLGIIAGLDDGSDGEVRLLGHNLSQMNEEQRAQLRAESVGFVFQSFMLIPTLNALENVQLPALLRGESENSSRKQAVELLEQLGLGKRLKHMPAQLSGGEQQRVALARAFSSQPKILFADEPTGNLDRQTGDRIADLLFSLNRDYATTLILVTHDSQLAARCQRCLRLVDGKLREERZ

SEQ ID NO: 3520 - protein, 552 aa, Photorhabdus luminescens
GMRSIYFKSAHILSLRDKKGFFFEFSPDINIITGENDTGKSSFIKSLYHTLGADVRLDKKWKDDNFVSKVVICVNNRDYAFIRHEKRISIFDITEEQEHLLVTSNSRTDIALTVRDIFDFNLELVLKETLVQGQAQPASLYLPFYIDQDNGWGTVLDSFSSLKMYKDWQKNILNFHAGVKPKEYYKLQGKINLIDIDLKEIRATLKALEAAKKRFEESFGRVLFDVDVEYYEELLERFLRKCQYLHKEETGYRIKLIKVLSQRDELVAEIEESKRQLYENNIDSLSTSASLEAKYAVLENREKLLQIIPELYDQKSVYDEQIASIKEDLKNAQRLSSELKGMLQEVKEQLTLQDVIKSQASKQVEFTFDEQINELLQKISELDVARTKLSKEIAEFDDKKRTSEINEKFKESLKFAQTELGIKDPKVGTILQYGPISKSETGSRAPRAILAYHYALLKTIEDKSTSPMLPVVIDSPKQQDPDPHTTKKLFDLCIDGLSTNNQLIIGSVSFERETDGFKTLTMTEKYSLLKVNLYDKVYQQVMPLYQKASLSZ

SEQ ID NO: 3521 - protein, 200 aa, Photorhabdus luminescens
LNIMQPKISGAILAGGRATRMGGNDKGLIFLNKKPLYQHIADKLFPQVDELIINANRNLDIYRQSGYHIVPDLTPDFSGPLSGMLTALKSASYDWVIFVPCDVPDLPTDLVIRLWQGKQQALAAYVNDGSRAHPTIALLHRSLTSQLENYLANGDRKLILFMHKIRAIAVQFDDNPIVFTNLNTPQDCQHWEHIQEIKKZ

SEQ ID NO: 3522 - protein, 331 aa, Photorhabdus luminescens
VLTNQSAFNFRELTPDLIMDALVQTGLYVDSGLTELNSYENRVYQFTDEDRKRYVVKFYRPLRWNQQQIQEEHDFALALQQADLPVAAPLVFNKQTLLTFKDFFFAVFPSIGGRQYESDNLFQLEDVGRLLGRIHQIGRRQKFTSRPTIGLNEYLHQPRQYLAACELVPAGQKRQFLAVLDDLINAVASNWRDDWQILRLHGDCHPGNILWRDEAWFVDLDDARNGPAIQDLWMLLHGSRQEQLLQLDTLLEAYSEFADFDPKELSLIEPLRAMRMIYYLAWVARRWQDPAFPKAFPWMADTDFWLKQTSLFSEQIKLLQESPLQLNPMYZ

SEQ ID NO: 3523 - protein, 208 aa, Photorhabdus luminescens
MKKLWLALVGMVMAFSVSAANFTEGKQYVELKSPVADQPPVLEFFSFYCPHCYQFEEIFKVPQTVKQHLPEGTKLVRYHVDFLGPLGKELTTAWAAAMAMGVEDKVTPVLFEGIQKTLAIKTPNDIRNAFIKAGVTAEDYDAAMSSFVVKSLVVKQQKAAQDLQLRGVPAMFVNGKYMVKNDGIDATSADNYAKPYSDVVNFLLSQKZ

SEQ ID NO: 3524 - protein, 389 aa, Photorhabdus luminescens
SMETQELLAIIARDEDSRHQFKADVNNASSLGAEMVAFSNGTGGLILIGVNNGDGSRSGLTREDIGRINQVIANAATNNVRPPINPVTENIQLPDGLVIAVHIEQGISKPYMDTQGYVWVKNGSDKRRVTAREELQRMFQEAALIHADETLVSGTSVADIDQEFFDSFFEGEYGERVEEQGVSRSQLLENMNLAKNGQLNICGTLLFASRPQIRLPVFIVKAVAFPGVDIEDEHYIDSQDINGKLSDVFQKVLGFVLANIRHIQNKQSFNSLGEPEIPRIVLEELISNALIHRDYFVSAPVKVLVFADRIEIISPGHLPNNLTIENIKMGNSNIRNPILASFASKVLPYRGLGSGIKRAIKAYPDIELIDNREGNTFKAIISRMLLNEZ

SEQ ID NO: 3525 - protein, 876 aa, Photorhabdus luminescens
MSDDTFEYGSRWLKTDFHLHTRADKEFKYTGADNDYVNQYVHSLKDADIGLGVITNHNKFDMSEFKSLRKKAQKSGIGLLPGIELSVKDGNAGVHTLVVFSDEWISNKEQKNYIQDFLNVTFAGKANFEQENARSNHDILKTIKILDGYHKDYFLVFAHVEAPNGLWGGLLPGRIKELFDNAFVQCRALAFQKVRTRDERSKIQQALGDLYPAEVEGCDAKNLADMSARKEASYLKLGAFSFEAVKFALRDKTSRVQAKLPDYHHSFIRKISFEGVGTLGGTEICLSRELNTLIGIRGSGKSSVLEGIRYALNIPFGDKSSDVEYKEGLVKHLLCSGGKITIDAIDRRGQPYQIRRILGERPDVYVNGQLQPGVSIRETVLHQPIYFGQKDLSSTGAGFEKDLIEKLVGEALISVRQKIEQGRQRVVDAIDQIKRLTRDALQKQEWLQKKQDVEFKLRFYQQHGVEAKLQKQIDFDRDERKAQQMIQGAQHYLTELNSFIASFEDELKNQILYKSAQNQPFFDGFFAVYQQLLTGFDEIKQVAGSDQATVQQLQQKLVGFQQQKQALKEEFAEIERKLASEFQQAGAQAISPQEFKQFKSQLDQAEQMLAVLTKSEQQYTDLNQGVERELVQLNSLWFEEYGTIEQVLNKINRVDSPLKIVPKFKDNKAAMLKHIQDLYRGSRIREATLQTVVDEFSDFGAVWREKDKLKAQLGGSFDTFCQYFEDNLDALLTWQVPNVFTIEYHGKALAHHSLGQRASALILFVLSQQENDIVIIDQPEDDLDNQTIYDDVIKLIRELKPKTQFVFATHNANIPVLGDAEQVIACEYQDDNINIVSGSIDCADVQQRIVGIMEGGAEAFEKRKQVYEAWKPKSSZ

SEQ ID NO: 3526 - protein, 338 aa, Photorhabdus luminescens; identical to SEQ ID NO: 2399

SEQ ID NO: 3527 - protein, 930 aa, Photorhabdus luminescens
MAQIADNPLILVDGSSYLYRAYHAFPPLTNSAGEPTGAMYGVLNMLRSLIMQYKPSHVAVVFDAKGKTFRDELFAEYKSHRPPMPDDLRTQIEPLHQMVEAMGLPLLVVPGVEADDVIGTLALQAEKEGRAVLISTGDKDMAQLVTPNITLINTMNNTILGPEEVVEKYGVPPELIIDFLALMGDSSDNIPGVPGVGEKTALGLLQGIGGMDDIFANLDKIAGLSFRGAKTLADKMVQHKDVAYLSYQLATIKTDVELDKTCVALSVKEPDTEKLHQLFSRYEFKRWLSDVANGDWLAEKGKKPVSTGNDESSPTEDKSAAATLSSDNYQTILDQQSFDEWIEKLKKASVFAFDTETDSLDTLTANLVGVSFAISAGDAAYLPLGHDYLGAPEQLDREVVLAALKPLLEDSNLLKIGQNIKFDRGVLARYGIELQGIAYDTMLESYVLNSVAGMGRHDMDSLAERHLNHKTTTFEEIAGKGKNQLTFNQVAVEQAAMYAAEDADVTLLLHQAMWPQLEKAPTLEKVFLNTEMPLVMVLSRMERTGVLIDANILAEHSKEITARLDELEKEAHELAGEVFNLASPKQLQTILFEKLQLPVVKKTPNGAPSTNEEVLEELADTHALPKVILEHRGLAKLKSTYTDKLPQMVHPLTKRVHTSYHQAVTATGRLSSRDPNLQNIPVRNKEGRRIRQAFVAPEGYRIMAADYSQIELRIMAHLSQDQGLLKAFAEGKDIHRATAAEVFGLPLEQVTSEQRRSAKAINFGLIYGMSAFGLSRQLGIPRGEAQRYMDLYFERYPGVLAYMERTRKQAEEQGYVETLDGRRLYLSDIKSRNAMRRKAAEREAINAPMQGTAADIIKKAMIAVDDWIVSEEPKVRMIMQVHDELVFEVHESELEYAEQKIRELMEKSMVLDVPLKVDVGIGDNWDQAHZ

SEQ ID NO: 3528 - protein, 464 aa, Photorhabdus luminescens
NNCYTFSQLGMVFRINALWTKNKSDTTLTRRIIMNQHDNASSGINHNSNSPLEWEENVYCSNNIALASTIGATAMLLQNGSVITWGLTHLGGQVPPDIAVLRDIVSLSSTQYAFAALRADRSVVAWGDSVNGGQLPPDIAQLKDIVSLSSTANAFSALRANGSVVAWGDNRYGGQVTPEVAQLQDIVSVTSSGNAFLALRANRSIVAWGRLAGVLPPEITQLQDIVSVLGKNDMYSTFAALRANRSVVAWGYSLFGGQVPPAIAQLQDIVSLSQTGTAFAALRANRSVVAWGNASRSGTVPPAIAQLQDIINLIGSGGTFIALRSNRSIVAWGDTPIPSEIAALSDIVDLITTSSAFTALRTNRSVVTWGTIESIEQVPYDAAQVQNVISLSASSDAFAALRADRSIVAWGDIYNGGKIPPEIANLKDVISLTSTPRSFSALRANGKRVGWGGGDFVSHGEYDZ

SEQ ID NO: 3529 - protein, 211 aa, Photorhabdus luminescens
LTIKNHNYHMTRFITSAPDIRHLPQDMGIEVAFAGRSNAGKSSALNALTKQKSLARTSKTPGRTQLINLFEVEEGIRLVDLPGYGYAEVPEEMKRKWQKALGEYLQKRECLIGLVVLMDIRHPLKDLDQQMIQWAVAMQVPVMVLLTKADKLASGARKSQLNKVRDALLALNGDIQVEYFSVPKKIGIDKLHQKLDIWFSQKAVQVENHRZ

SEQ ID NO: 3530 - protein, 222 aa, Photorhabdus luminescens
MSSLTNVLTEMLNFKNIPRYHLLFLLLMVLFSARATAADTLLILGDSLSAGYHLPIEQSWPALMEKKWQKSGNKITVINGSISGNTAAQGLERLPELLKQHKPRWVLIELGANDGLRGFPPQHTEQDLQQIITLVKQANIQPLLMQIRLPPNYGRRYTESFAKIYPKLAEYNQIPLLPFYMEQVAIKPEWVQQDGLHPNLAAQPFIADWMSDTLSAHLNYSZ

SEQ ID NO: 3531 - protein, 404 aa, Photorhabdus luminescens
MKEHIAVDRNTYDQVMLPIYSPAQFIPVRGQGSRVWDQHGKEYIDFAGGIAVVALGHCHPTLVDVLKQQGEKLWHISNIFTNEPALILAQKLIDATFAERVFFANSGAEANEAAFKLARHYAIARHNPYKTKIIAFHQGFHGRTLFTVSVGGQPKYADGFGPKPADIIHVPFNDLDAVKAVIDDHTCAVVLEPVQGEGGVTAAAPAFIHGVRELCDKHQVLLVFDEVQSGMGRTGKLFSYMHYDVTPDIITTAKALGNGFPISAMLTTVNIASVMTPGAHGTTYGGNPLACAVANVAFDIINTPAVLAGVEKRHNLMVNFLNDINQKYSIFGEIRGKGLLIGAELKAPHQGKAKDILQLAAENGLMLLSAGGDVLRFTPSLIISEEEIAQGMERLEQVINQLVZ

SEQ ID NO: 3532 - protein, 211 aa, Photorhabdus luminescens
MVLGKPQTDPTLEWFLSHCHIHKYPSKSTLIHQGEKAETLYYIVKGSVAVLIKDEEGKEMILSYLNQGDFIGELGLFEEGQERTAWVRAKSACEVAEISYKKFRQLIQVNPDILMRLSAQMANRLQTTSEKVGNLAFLDVTGRIAQTLLNLAKQPDAMTHPDGMQIKITRQEIGQIVGCSRETVGRILKMLEDQNLISAHGKTIVVYGTRZ

SEQ ID NO: 3533 - protein, 290 aa, Photorhabdus luminescens
MSVKHPIIAITGSSGAGTTTTSLAFRKIFQQLNISAAQIEGDSFHRYTRPEMDAAIRKAKEQGRHISYFGPEANDFGMLEKTMIDYGETGEGRRRKYLHTYDDAVPYNQLPGTFTPWESLPKQTDVLFYEGLHGGVVTPQHNVASHVDLLVGVVPIVNLEWIQKLVRDTGERGHSQEAVMDSVVRSMDDYINYITPQFSRTHINFQRVPTVDTSNPFSAKTIPSLDESFIVIRFRDLTQIDFPYLLAMLQGSFVSSINTIVVPGGKMGLAMELIMTPLVQRLLEGEKICZ

SEQ ID NO: 3534 - protein, 326 aa, Photorhabdus luminescens
MTDIFRPLTGASNPHLQTLLPRLVRRYPELQPYWQRLDLPDNDFVDLAWSEDPATAAHKPRLILFHGLEGSFHSPYAHGLLHICQKKGWLGVVMHFRGCSGEPNRQKRLYHSGETSDARYFLSWLKQTYGDVPTSAVGYSVGGNMLACYLAEEKIDAQINAAVIVSAPLMLAACSLRIEKGFSHVYERYLLNSLKRNATRKLLRYPGSLPINLSQVKGLKHIREFDEIVTAKIHGFKNAADYYHQCSALPRLPDITVPLLIIHAKDDPFMAPEVIPDLKMLPKNIEYQMTEYGGHVGFVSGSLKKPQMWLEQRIPNWLSSYLEQPZ

SEQ ID NO: 3535 - protein, 295 aa, Photorhabdus luminescens; identical to SEQ ID NO: 1209

SEQ ID NO: 3536 - protein, 203 aa, Photorhabdus luminescens
MTASLIFSLTTFLFISSITPGPNNMLLTSSGANFGFIRSLGLLFGVVLGMQTILYLAAFGIAALLLVYPAIHTVMKIAGSLYLLWLAWKTATASYRRLDTKDSAVIKPVRWYQGWLLQFLNPKAWLMGLGAVGSYSIAGDHYLYSIIVISIVVMFINFLCGMVWAGFGSLIGTLLRSRNAWFLFNITMGILTATCVPLIWLGZ

SEQ ID NO: 3537 - protein, 493 aa, Photorhabdus luminescens
MAKINQSVIAQILKAIGNANNVAQCGNCMTRLRLTLRDSTQVDKVALKQIPNVLGIIESDDQFQIVLGPGKAQAAAEIMNELLNSSTPTAQSKPSDTHLANIASANKKQLKEKQVSAVHKFLTKFATIFTPLIPGFIAVGLLLGFATLLEQITIQGVEHPNTILVEIIGYMKVFSKGMFSFLSILIGYNAQKAFGGSGINGAIIASLFVLSYNPDATSGFYSGISTFFGYSIDPRGNIIGVLIAAILGAWVERQVRKIIPDNLDMILTSAITLLIMGAIAFIFIMPLGSYLFSGMSWLFLHLNGNPFGTAILAGLFLLAVMFGVHQGFVPVYFALMEAQGFNSLFPILAMAGGGQVGAALALYVKAKKDSLLRTQIKGAIIPGLLGIGEPLIYGVTLPRIKPFITACLGGAAGGFFIGLIAYLGLPVGLNTVFGPSGLVALPLMTSNNGIFVGMAVYAAGLVVAYISGFVLTLIFGSKKIEVLKADVQSQKEZ

SEQ ID NO: 3538 - protein, 302 aa, Photorhabdus luminescens
MKINLNNMVTESRNPASANIDTLPTLEMLKLINDEDKKVALAVEQTLPKIAETVDKIAEAFRQGGRLIYIGAGTSGRLGILDASECPPTYGTKPEQVVGLIAGGHQAILHAVENAEDNQQLGANDLQALHFNSKDVLVGIAASGRTPYVLGAMTYAKSVGATVACISCNPESPMTQAADIAIAPIVGPEIVTGSSRMKAGTAQKLILNMLTTGAMIRTGKVYSNLMVDVEATNAKLVERQKNIVIAATECNREQAEQALAECDGHCKTAIVMILAGINAQQAKTLLKKHHGFIRPTISAVRZ

SEQ ID NO: 3539 - protein, 324 aa, Photorhabdus luminescens
RFQMAVFFLSNWKLRRLDTNVIIIGFKKCGKGFTMTYKKYNPSLEGYMGDFLRGHVGANQLKPQHEFFDAIGLEKQLRENTTYIALLSLDEAKDVLEDIDSPKPKSPFIKKIFEITDPISPYAGNIHDSFDLFNVIGEFKRLGIKATEYVGKDGNRYIKISGYAGVRKIITASRYKASNMKVISMGIGQKGLNSGIVKGMKFSIFFSAAYRTVELMFKDEYTLADFLGNIAVDLAKTVITAFVSWTIGSLMLVTSIAGASVVGVAIIVFFVGVGVTVALDSIDKKYKISEAVINLIKKEMERKPRTPETGLNQIFYNWGRYVKZ

SEQ ID NO: 3540 - protein, 305 aa, Photorhabdus luminescens
KINLNGGDMDIRNLKAFIVLAETLNYHKASQILHISQPALTKKVNALEAEFGALLFSRGPGGTRLTDFGQKTFENAQKLLGHFEQFQIQVNHDLQDDAPHYLYVSSCFPIYDSGKMEERIFLGRKEKAVLVLITGLTFEQQMNLLNSGLLHIAIVPLPLTSSLMPRKIFTEKLVYLFKKGSDWFRHFTELSAEMASLYQLIDMDENDIPIDFIDGINAFSIYDNSMNLMLKTNDIMVMIELIIKRNGFSLIPEKVIRSIPSQYLDLLEVLKTDMEIDFGILWSPIINYELINETELFSSLIDNVZ

SEQ ID NO: 3541 - protein, 262 aa, Photorhabdus luminescens
MQKSVLITGCSSGIGLVAAKTLHQRGYRVLAACRKPADLQHMRELGLEPIELDLDDKMSVERAAAEVIKLTNGRLYGLFNNGGFGIYGPLNTISREQLERQFSTNLFGTHQLTCLLLPAMQLHGEGRIIQTSSVMGLISTPGRGAYSASKYALEAWSDALRMELAGTGIKACLIVPGPIKTRFSENVNQTQSDKPVKNPRIARHFTLTPEAVVNKLIHALESPNPKLRYPVTWVTHAVAIMRRILPGRVMDKILSKQSGTTZ

SEQ ID NO: 3542 - protein, 426 aa, Photorhabdus luminescens
SGRCTMSCIRMHLHRCAWLLIGFLGTVDIVSAAESGNYTPPGGTPSVDSLMESASNSDYGLSTLMAQQSKSGESSSNRSASKHAVGTSILVGMGASSGGSEAAARKVLRAENRKLKRQLTDSIAELKSSQTELEKSRKQLSDHQSVRIEMQKQKDTLQKQLSDHQTLLTATQHQFKEAQTQLEAVRKQFREADIVREQLETALVSTRYQLVQANDRAVKASKSVSVPLDSDNRKRDYVVGQAMASGLKETLASYAESGLSLDPVRVTAGLTDGLRNRMQLKRSDMDKYYLTFAEQLQKQVNAKVKMGEALIAKKTAGRKPAKKVNGLVYFVVKKGHPIKDQDAPVSLALSEQIVDGATLSAIPTLTLTADDDIPAVVREALPLLGEEAEVDAYALAKVVYGNLPMPKGVTPFTVLVYHLKGIKPQZ

SEQ ID NO: 3543 - protein, 280 aa, Photorhabdus luminescens
NGGNMRGFFYLVFFMALAGVPFIEANAGAFVMPIGMSEDNDRTPRTTQEIIAWDENDTDPNPCHGSGVCYVGPDVKYRYRLPGMHGSCIEGKHCIEISRLKTKKEVAEAYKKTFPLPYRSDFRLISTDATCIGLFFIRHQPTLGFSDAELWPGSTCGRLPPTNQSCNIFLPPVIDHGDLGVENLNGNKKTITGNVQCTLPANLTLYTKSSTGEKFIYLNPKKTLYSDVDINGSNAWNGVPITVSGNNLYSFSFSSRLQSLGKVDAGAYSGDVIVIMTFNZ

SEQ ID NO: 3544 - protein, 187 aa, Photorhabdus luminescens
LIPSLCRRNRLHVLKALLLLLSISSVCNAKDKFESIVRIKVNVLREACNIQPGDDAITVDFDTVFGKHLYQNERSHSKAFSIHLINCDVTRAREVNIKFLGKENNELPGLLAFQPGSQASGAAVGIESLAGEPISINKTVKKYSLNNGNATLDFKAYVQGEPSAIRNHSIVFGKFSAISTFMLDYEZ

SEQ ID NO: 3545 - protein, 253 aa, Photorhabdus luminescens
MSMTMKKNAAASAVMLAGILAVQQANAAIALDRTRAVFNGEDRSMSLSISNQNKELPYLAQAWIEDEHGNKINTPLTALPPLQRVEPGAKSQVKLQVTQGINMLSQDKETLFYFNLREIPPKSNKPNTLQIALQTRIKLFYRPKAITVGRTDYENPYQEKLTMTRQGDRYVVNNPTPYYVTIASASSSLNGTAVSGFNPMMIPPKGSAVLGGSASAMGNNPVLIFINDFGGRPKLVFGCSGGTCTVKSSKPGZ

SEQ ID NO: 3546 - protein, 936 aa, Photorhabdus luminescens
HKWRGEWCGITDIGQYRSGSRAGQTHACRGSANRLNAAGLYFTSGNSSPSVTRRGPPHHDTFQTGLFLMKGPIMPSLLCGARDSSVALCILLALCRVQVVKAADRVEFNTDVLDVKDRARIDLSQFSHAGYIMQGSYQMVLRLNKNELPEQTVQFIAPDHDPKGSEACLTPKMVDQLGLKADAIRQLTWWYNGQCLEIASLKGMEVRGDLGAGALYISMPQAYLEYTVENWDPPSRWDNGISGMLFDYSVNAQVTNQSGAGSQAQSLSGNGTAGANLGPWRLRADWQVQYSHTTGQVGSAQQSWEWSRYYAYRVIAALRAKLTLAEDYLNSGMFDSFRYIGASLISDDNMLPPNLRGYAPEVTGVAKTNAKVTISQQGRVIYETQVAAGPFSIQDLNTAVNGKLDVKVQEQDGSVQTFQVNTANVPYLTRPGMVRYKIAAGKPSDIKHRSKGPGFATGEFSWGVNNGWSLYGGALLARGYNALAIGIGRDLLAFGALSFDITQSRAQLLHDDTKHGGSYRVSYSKRFDEYDSQITFAGYRFSERNFMSMSQYLEARYYGVNNGRGKEFYTITFNKQFKELGLSVYLNYGHQTYWDRPNNDTYNLSLSRYFDIGRFKNISLSLTAYRTQYNGTNDDGLYLSMAVPWGENSTITYDGQLSRNSSNTVGYYDRIDDNNAYRINVGNGQGGRSIGSGYFTHEGDIAKLTANANFRGSEYSAMGLSLQGGMTATADGAALHRINMIGGTRMMIDADGIGGVPIRGYGSVTHTNIFGKAVVSDINSYYRSSVNVDVNQLADNVDATRSVVQGTLTEGAIGYRKFGMIAGEKAMAIIKLTDGTAPPFGAIVMNEREMQTGIVNDEGSVWLTGINPGENMSVHWDGRIQCLITLPQSLLANLMNNLLLPCRRVKGNDGSDAVETVVTPANTGNVARIGGENGRZ

SEQ ID NO: 3547 - protein, 239 aa, Photorhabdus luminescens
KKPFCALESLSVSLSRGCLAFRLTGETAGKRGPYKIREMNLPVNQILESEMTLLSRPTCSKMLPSLLTLLVLTSLILSFMATAINQEHGRVNMQGSIIDTPCTIALGNQDQTIDISSILVGQIIRSGHGPVRLLSIQLINCLLAPVLLNRLSRSYFQVTFDGAAARNDLFSINGEASGVGLQISDSTGAVVAPGKPMPVEDLQIGSMRLDYTLRLVTAHQVLRAEVLHTMIRFKLDYFZ

SEQ ID NO: 3548 - protein, 191 aa, Photorhabdus luminescens
MKKRKFLTRHEIDAILEKARQGRHAERDYCMLLMCFIHGFRVSELCNLTLSDLDLSSEIIHVRRLKGGLSTTHPLVPEELNALNQWINIRKSWRESDTSWVFLSQKSGAISRYQVYSLLKRYGRQALVDISPHPHMLRHACGYALADLGRDTRLIQDYLGHRNISHTVIYTASNVKRFSNIWEIPSKGFSZ

SEQ ID NO: 3549 - protein, 642 aa, Photorhabdus luminescens
MIVFSSLQIRRGTRVLLDNASATINPGQKVGLVGKNGCGKSTLLALLKNELQAETGTFTFPSNWALSWVNQETPALEIPALEYVIDGDREFRQLEQQLRIANEKNEGNLIAHLHGQLDTIQAWTIRSRASSLLHGLGFSQEQLDQPVRAFSGGWRMRLNLAQALLCRSDLLLLDEPTNHLDLDAVIWLEKWLKSYPGTLILISHDRDFLDPIADKILHIEQQSLFEYSGNYSSFERQRATKLAQQQALYKSQQEKVAHLQSYIDRFRAKASKAKQAQSRIKMLERMELIAPAHVDNPFHFSFRKPESLPNPLLKMEKVSAGYGERTVLNSIKLNLVPGSRIGLLGRNGAGKSTLIKLLAGELQSQSGTVELAKGIKLGYFAQHQLEYLRADESPLQHLVRIAQQETEQQLRDYLGGFGFKGDQVTDPSGRFSGGEKARLVLALMVWQRPNLLLLDEPTNHLDLDMRQALTEALIDFDGALVVVSHDRHLLRSTTDELYLVHDGRVESFNGDLEDYQQWLIDQQRQQNQQIRENNDKEKETSSQSAQERKDQKRRQADFRNQTQPLRKQLANFEKQMEKLGGELVALENQLLDSAIYDSSRKVELTEYLQKQNQTKLKLEEIELAWMEIQEQLEKITQEFEGZ

SEQ ID NO: 3550 - protein, 191 aa, Photorhabdus luminescens
MKVAKDLVVSLAYQVRTEDGVLVDESPASAPLDYLHGRGSLISGLEKALEGREAGESFDVSVQADDAYGQYDDNLVQRVPKDVFVGVDELEVGMRFLADTDMGPVPVEITAVEGEHVVVDGNHMLAGQNLKFNVEVIAIREATEEELAHGHVHGAHGHEHGEGCCGGHGDDDSHHHHNEGHGCCGGGGCHZ

SEQ ID NO: 3551 - protein, 255 aa, Photorhabdus luminescens
MKSLFKVTLLATTLAMAFSAPQVLAAKADSQSSTELNSAFKTEDQQNAYALGASLGRYMQNTLKEQKSLGIPLDKDQLLSGVQDAFNNKSKLTDSEIENTLRAFEGKVKSAAEAKMEKEASENEAKGVKYREEFAKEKGVVKSKTGLLYKIEKEGSGKKPVASDTVVVNYRGTLIDGKEFDSSYKRNEPLSIRLDSVIPGWTEGLQNVKKGGKIKLVIPPELAYGKADLPGIPANSTLVFDIELLDVKAETKAKZ

SEQ ID NO: 3552 - protein, 286 aa, Photorhabdus luminescens
MLPTSIGINVNESNLHQIVEQSMTVPVLFYFWSERSPHCQELSVTLDKLAAEYADQFILAKVDCDKEQMVAAQFGLRAIPTVYIMQQGQPVDGFQGPQPENVIREMLTRVLPKPEELKAAQAEELIAEGKHQEALPLLKEAWQLAPKNSAIALMLTKVQIMLNNIEEAQEILNLIPLQDQDTNYHSLLAQIELQKQAADTPEIQQLQQEFAIQPENAELAVKLALKLHEVSRNEEALELLLSFLKKDLSAANGAVRKTMMDIMSAMGTGNTLASKYRRQVYSLLYZ

SEQ ID NO: 3553 - protein, 245 aa, Photorhabdus luminescens
MVYLMSNPLLSGDISDVDLLENQPFTETDHEILKSYEAAVDGLAMLIGGHCEIVLHSLEDLKCSAVRIANGEHTGRKIGSPITDLALRMLHDITDEDCSASKAYFTRAKSGSLMKSVTIAIRNRNRRVIGLLCINMNLDVPFSEIIQTFIPEETHDVAPNVNFASSVDDLVAQTLEYTIEEVNIDRSVSNNAKNRQVVLNLYEKGIFDIKDAINQVAERLNISKHTVYLYIRQFKNGECLGPERZ

SEQ ID NO: 3554 - protein, 703 aa, Photorhabdus luminescens
MARTTPIARYRNIGISAHIDAGKTTTTERILFYTGVNHKIGEVHDGAATMDWMEQEQERGITITSAATTAFWSGMAKQFDAHRINIIDTPGHVDFTIEVERSMRVLDGAVMVYCAVGGVQPQSETVWRQANKYRVPRIAFVNKMDRMGANFLRVVEQLKTRLAANPVPLQLAIGAEDAFTGVVDLVKMKAINWNDEDQGTTFTYEDIPADMQDLAEEWRSNLIEAAAEASEELMEKYLGGEELTEEEIKAGLRHRVLTNEIILVTCGSAFKNKGVQAMLDAVIEYLPAPTDVESIKGILPDGKDTSAERHSDDNEPFSALAFKIATDPFVGNLTFFRVYSGVVNSGDTVLNPVKDRKERFGRIVQMHANKREEIKEVRAGDIAAAIGLKDVTTGDTLCDINAPIILERMEFPEPVISVAIEPKTKADQEKMGIALGRLAQEDPSFRVSTDEESGQTIIAGMGELHLDVLVDRMRREFKVEANVGKPQVAYRETIRSTVEQEGKFVRQSGGRGQFGHVWLRIEPMEPGGVGYEFANEIVGGVVPKEYIPAVDKGIQEQMKNGVLAGYPIVDVKVALFDGSYHEVDSSEMAFKIAGSMGFKEGFMKAKPALLEPIMKVEVETPEDYMGDVIGDLNRRRGMIDGMEDMTTGKIVRAQVPLSEMFGYATDLRSQTQGRASYSMEFLKYNEAPSNVAQAIIEARKAKZ

SEQ ID NO: 3555 - protein, 395 aa, Photorhabdus luminescens
VSKEKFERKKPHVNVGTIGHVDHGKTTLTAAITTVLAKTFGGNARAFDQIDNAPEEKARGITISTSHVEYDTPSRHYAHVDCPGHADYVKNMITGAAQMDGAILVVAATDGPMPQTREHILLGRQVGVPYIIVFLNKCDMVDDEELLELVEMEVRELLSQYDFPGDDTPVIRGSALKALEGDAEWEAKIIELAEALDSYIPEPERAIDQPFLLPIEDVFSISGRGTVVTGRVERGIVKVGEEVEIVGIKDTTKTTCTGVEMFRKLLDEGRAGENVGVLLRGTKRDEIERGQVLAKPGSIKPHTTFESEVYILSKDEGGRHTPFFKGYRPQFYFRTTDVTGTIELPEGVEMVMPGDNIQMKVTLIAPIAMDQGLRFAIREGGRTVGAGVVAKVIAZ

SEQ ID NO: 3556 - protein, 234 aa, Photorhabdus luminescens
MAKLTKRMRTIREKVDATKQYDINEAVVLLKELATAKFVESVDVAVNLGIDARKSDQNVRGATVLPHGTGRSVRVAVFTQGANAEAAKAAGAELVGMEDLAELVKKGEMDFDVVIASPDAMRVVGQLGQILGPRGLMPNPKVGTVTPNVAEAVQNAKAGQVRYRNDKNGIIHTTIGKVDFDADKLKENLEALLVALKKGKPSSAKGIYIKKVSLSTTMGAGVAIDQSGLNASAZ

SEQ ID NO: 3557 - protein, 1351 aa, Photorhabdus luminescens
LISELRNPMVYSYTEKKRIRKDFGKRPQVLDVPYLLSIQLDSFQKFIEQDPEGQNGLEAAFRSVFPIQSYSGSSELQYVSYRLGEPVFDVKECQIRGVTYSAPLRVKLRLVIYEREAPEGTVKDIKEQEVYMGEIPLMTDNGTFVINGTERVIVSQLHRSPGVFFDSDKGKTHSSGKVLYNARIIPYRGSWLDFEFDPKDNLFVRIDRRRKLPATIILRAMNYSTEEILNLFFSKTIFEIRDNRLQMTLVPERLRGETASFDIEANGKVYVEKGRRITARHIRQLEKDEVNRIEVPVEYIAGKVVARDYIDVNTGEIICAANMELSLDLLARLSQSGHKSIETLFTNDLDHGAYISETLRVDPTNDRLSALVEIYRMMRPGEPPTREAAENLFENLFFSEDRYDLSAVGRMKFNRSLSREEVEGSGILSKDDIIDVMKKLIDIRNGKGEVDDIDHLGNRRIRSVGEMAENQFRVGLVRVERAVKERLSLGDLDTLMPQDMINAKPISAAVKEFFGSSQLSQFMDQNNPLSEITHKRRISALGPGGLTRERAGFEVRDVHPTHYGRVCPIETPEGPNIGLINSLSVYAQTNEYGFLETPYRLVRDGVVTDEIHYLSAIEEGNFVIAQANTVLDDEGHFVEDLITCRNYGESSLFNREQVEYMDVSTQQVVSVGASLIPFLEHDDANRALMGANMQRQAVPTLRADKPLVGTGMERAVAVDSGVTSVAKRGGVVQYVDASRIVIKVNEDEMYPGEAGIDIYNLTKYTRSNQNTCINQMPCVSLGEPVERGDVLADGPSTDLGELALGQNMRVAFMPWNGYNFEDSILVSERVVQEDRFTTIHIQELACVSRDTKLGPEEITADIPNVGEAALSKLDESGIVYIGAEVTGGDILVGKVTPKGETQLTPEEKLLRAIFGEKASDVKDSSLRVPNGVSGTVIDVQVFTRDGVEKDKRALEIEEMQLRQAKKDLTEELQIFEAGLFARIRSVLIAGGIEAEKLDKLPRERWLELGLADEEKQNQLEQLAEQYDELKAEFEKKLDAKRRKITQGDDLAPGVLKIVKVYLAVKRQIQPGDKMAGRHGNKGVISKINPIEDMPYDENGTPVDIVLNPLGVPSRMNIGQILETHLGMAAKGIGDKINAMLKQQQEVAKLREFIQKAYNLGDETRQKVDLSTFSDEEVMRLAENLKKGMPIATPVFDGAKEKEIKELLKLGDLPTSGQITLFDGRTGEQFERQVTVGYMYMLKLNHLVDDKMHARSTGSYSLVTQQPLGGKAQFGGQRFGEMEVWALEAYGAAYTLQEMLTVKSDDVNGRTKMYKNIVDGNHQMEPGMPESFNVLLKEIRSLGINIELEGEZ

SEQ ID NO: 3558 - protein, 1407 aa, Photorhabdus luminescens
VKDLLKFLKAQTKTEEFDAIKIALASPDMIRSWSFGEVKKPETINYRTFKPERDGLFCARIFGPVKDYECLCGKYKRLKHRGVICEKCGVEVTQTKVRRERMGHIELASPTAHIWFLKSLPSRIGLLLDMPLRDIERVLYFESYVVVEGGMTSLERSQILTEEQYLDALEEFGDEFDAKMGAEAIQSLLKNLDLENECETLREELNETNSETKRKKLTKRIKLLEAFIQSGNKPEWMVLTVLPVLPPDLRPLVPLDGGRFATSDLNDLYRRVINRNNRLKRLLDLAAPDIIVRNEKRMLQEAVDALLDNGRRGRAITGSNKRPLKSLADMIKGKQGRFRQNLLGKRVDYSGRSVITVGPYLRLHQCGLPKKMALELFKPFIYGKLELRGLATTIKAAKKMVEREEAVVWDILDEVIREHPVLLNRAPTLHRLGIQAFEPVLIEGKAIQLHPLVCAAYNADFDGDQMAVHVPLTLEAQLEARALMMSTNNILSPASGEPIIVPSQDVVLGLYYMTRDCVNAKGEGMVLTGPKEAERVYRAGLASLHARVKVRITEEVKDGEGNITTNTGLVDTTIGRAILWMIVPRGLPYSLVNQPLGKKAISRMLNTCYRVMGLKPTVIFADQIMYTGFAYAARSGASVGIDDMVIPEKKAGIIAEAEAEVAEIQEQFQSGLVTAGERYNKVIDIWAAANERVAKAMMENLSTETVTNRDGEEEQQVSFNSIFMMADSGARGSAAQIRQLAGMRGLMAKPDGSIIETPITANFREGLNVLQYFISTHGARKGLADTALKTANSGYLTRRLVDVAQDLVVTEDDCGTHDGILMTPVIEGGDVKEPLRERVLGRVTAEDVLKPGTADILVPRNTLLNEKWCDLLEESSVDSIKVRSVVSCETDFGVCANCYGRDLARGHIINKGEAVGVIAAQSIGEPGTQLTMRTFHIGGAASRAAAESSIQVRNKGSLKLFNAKSVTNSAGKLVITSRNTELCLIDEFGRTKESYKVPYGAVLGKGDGETVNGGETVANWDPHTMPVVSEVSGIIRFADMIDGQTITRQTDELTGLSSLVVLDSAERTGSGKDLRPALKIVDAKGDDVLIPGTDMPAQYFLPGKAIVQLDDGVSISAGDTLARIPQESGGTKDITGGLPRVADLFEARRPKEPAILAEVSGIVSFGKETKGKRRLVISPLDGGDAYEEMIPKWRQLNVFEGEVVERGDVISDGPESPHDILRLRGVHAVTRYITNEVQEVYRLQGVKINDKHIEVIVRQMLRKATIESAGSSEFLEGEQVEYARVKVANRKLEQEGKVAATYGRDLLGITKASLATESFISAASFQETTRVLTEAAVAGKRDELRGLKENVIVGRLIPAGTGYAYHQDRIRRRQLNEPAEAPQVSVDEATANLAELLNAGFGGDKKZ

SEQ ID NO: 3559 - protein, 297 aa, Photorhabdus luminescens
WGKIMESGINLNYEDITEENYILINNFYKRDIGSLDYFIWKNFKEKKYNLSSEIKAFFYKINDICLSIVITRKCEFSLKNRRVSINMLSDFGIDESVKSPTLIIESAKQTHRNDVDATVCYSDERKIKCYSKIFEKYICGRVNVFDFIEIVVEGCTKIDVDLRDFNEIGNINKINFFGREVNNNWIAYAKQCPCYSDIKLLTVGKELAILGFDDTTVEIIGLSNTAHGTIISVIDSCLAIRAKCRIILPNPIYSELQSRLNKHSIINKFSMMIAWHTEEDFNLCHEDIFISRIDKRZ

SEQ ID NO: 3560 - protein, 219 aa, Photorhabdus luminescens
MGCIFCHPESSFEKDKILLQGEYFYAFVPKGQIIEGYIIIATNKCDTDLGGCRCFAEIYDDEAIKELKQFKNIVNDFYREYYNISNPLCYENGRAGGCIIMDPNQKYCYHAHLCCFPTEIDLHNKLKDQFKMHTIDSLDELEMFGEAGPYIYVEDSGNKYIFTIGESDFIERGMIRTVLANSLNVPERSDWRDNEGIKEMDATAKKFKSYISNHMEVGZ

SEQ ID NO: 3561 - protein, 387 aa, Photorhabdus luminescens
MLYADVASTSWPKSQEVKDMINMYLDTLGVTPGRSLSQQSKKVTELVEECRHEFIEQTKLNGHGTVIFNSGATYSLNECLKGTLKPGDNVITTHLEHNSVLRPINHLKDIGVSSQFIDVTDGEIDMSHLAFLLKNKKTKLLVIHSCANTIGTFCNIDEIGKLAHLYGAMVLVDGSQSFGSQVMDLSKGNIDYLVFSGHKSLGGVSGIGGYFILDNGFSHNELIQGGTGVLSRLTTQPTGIPYKYESGTQNTIGILSLLASIRRLKKIGVENIQNQLQTLRTTLIDELSQLKKIKLICKHQVGLPTILFTVEGYHPGEVSYILENKYNIITRPGLQCAPLAHKKFGTYPDGAVRVSLDTTHTTEDILKIKSALVNITEENYRENTDNZ

SEQ ID NO: 3562 - protein, 307 aa, Photorhabdus luminescens
MDLFAFGAVPILIFIAVVIVFTCVKTVPQGYQWTVERFGRYTRTLLPGLHIIVPFIDRIGRKINMMEQVLDIPSQEVISRDNANVTIDAVCFIQVVDPVRAAYEVSNLELSIINLTMTNFRTVLGSMELDEMLSQRDSINSRLLHIVDEATNPWGVKITRIEIRDVRPPKELISAMNAQMKAERTKRADILEAEGIRQAAILKAEGEKQSQILKAEGERQSAFLQAEARERAAEAEARATKMVSDAIADGNMQAINYFVAQKYTDALTSIGASGNSKVIMMPLEASNLMGAIGGITELIGESKKGKZ

SEQ ID NO: 3563 - protein, 209 aa, Photorhabdus luminescens
MNMPDKNERYLIDLINGKLNYIHIDRNGDFNNTNIDWKETLILSGSFNPLHKGHEELKEIATAMTKRKPYYELSIKNAVKLTISTDEIFERIRQFKGKGDIVLSDAKIFTEKSHIYQGAIFVIGADLCQEINNPIYYGGEEGLKKSLMTIKNNDCRFLVAGRFFNNKYHTVDDLMNIRKEHRFLFESIPENLFRLDISSTEIRLMNKEZ

SEQ ID NO: 3564 - protein, 256 aa, Photorhabdus luminescens
TKNRRWNMSKENNKELLDSKINLNSTYLSKEIQRRLKQASFIFNPSQKTLNCQLNSSQIKLFSEICLFLEQDDNLDILASCIHDLWCAKYLVDNKTAMQDSITKLEIEYNLQVNFLKPYQAFTEKEKKFEKRLIKSDLSIISEVIKDTCSYDDNIVSDNFNYESLLSTNDTIFSDLMTILGHSDSVIEVAAKRIHAGWFDIMKEFYAHDERVQCQENSNIDNSDFIKNRDGIRIDLAAIYIVLMEIKYNNFYMEIZ

SEQ ID NO: 3565 - protein, 270 aa, Photorhabdus luminescens
NIITFTWRFKMIHLFLSPHLDDAALSAGGLIHKLVSENQKVIILTFFTEYDKDLTSHYSHSAHNDNIYSFIKLYSKRANEDIAFCNKLSVIPIHGKILDCIYRTDQYGEPMYKNSAMIYTGQIHKSDDASDMAQELIDKILLNYQPDYIYAPLGIGRHVDHIIINNLVPNIKGSRKFKILLYEDFPYVLGEYPIINPDSLESALLRNNKFDKRAILVDIDLKEKAQNILFYESQLEPLFDNKSNILISLEKYHRTINEIKVQERFWLIRZ

SEQ ID NO: 3566 - protein, 360 aa, Photorhabdus luminescens
MKKIFIIYHDLFLNGYGGVETVCSNLINLIGRANIEIDFIFISLNKKNRIENRDWLSHAQYISLTPSNDESRPDIACELSLILERFHPEILISLDTTSCNIARLSCEKINFPVKTYSWLHTSIRNPTSQKIKDLCCADEHLVISSGLRDQMLSFGIKTDKLHLIFNPIKMNSFIIPQPKHIARFLYVGRILAYKSKNLTELFLALSQLHGHWELHIVGSGDDEVYLKELSSQLNISNNIIWHGWKNQPWEFVMDNIKEVSAFILTSKYEGFGMVLAEAISYGIYCISSDCQCGPGDIINDFNGELYKSGSIPELSEKLQLIIDEYKIRDHQAIKNSIAFLYEDNFLLRITKALPVLAQIZ

SEQ ID NO: 3567 - protein, 311 aa, Photorhabdus luminescens
RNSTMSSHVNFNAIVDEVIEQDRLANLRPVVEKELLHYDILFCLSKDGLLKEITFQGGTSLRLCYGSNRFSEDLDFAGGRGFCSADLSRIKECIEKYLGVRYGLEVTVKEPNELRNKPEYAEVKVDKWQISVTTAPERKDLPKQRIKIEIANIPAYTNTPRSLIRNYSVLPDGYADLLVSVETLPEIMADKLIAFPATTSQIRYRDMWDLLWLSQQNTTPDIELIKRKVSDYQLDNFEELLQARIDSIEIIVASGHFHNEMRRFIPAPIYDRSVGQEAFSTYLTTSLKELLTTVKKSLYSSGDNSIPFKLZ

SEQ ID NO: 3568 - protein, 311 aa, Photorhabdus luminescens
MKTKLLSCCLSAVLCSTFPLIGYATPITATQATITAKTTTKQDIVAPSLSITALQKLSWQPINTSDTQTIILNAASQHLNEGEIQGPIAAFALPANRGSLDITLSSLVQDKQVYVPNVLVLDQGLRPAAFYPSSYFPYERPGVMSTDRLEGTLKLTPALGQQQIYVLVYTTRTDLQKSTQMVDPAKAYAQGVGNAVPAIPDPVARHTQTGTLKLKVRSEQNASNITIGQVFSSPAQEPIIVGPTQAIVTPSTLQKVKPVLSDTERYFSDAIKKEISNGNIDKALKLLDEAERLGSSTARETFINSIKNKGZ

SEQ ID NO: 3569 - protein, 430 aa, Photorhabdus luminescens
LMKSMRILPISLTIMAGLLSIEASAVEFHGYARSGIGWTGSGGEQQCFQSTGAQSKYRLGNECETYAELKLGQELWKDGNKSFYFDTNVAYSVAQKNDWESTDPAFREVNVQAKNVIDWLPGSTLWAGKRFYQRHDVHMIDFYYWDISGPGAGLQDIDLGFSKLALAVTRNTESGGSYGWIASQRKEIPTSNDVYDIRLSGLEVNPGGNLELGFDYGRANARDHYKLDRHASKDGFMFTAEHTQSMLGGFNKFVVQYATDSMTSSNSGHSEGASVNNDGYMLRILNHGAINLAEKWDLMYVAMYQDTDRDNNNGNTWYTVGVRPMYKWTSTMSTLLDIGYDNVKSQRTHDTNDQYKITLAQQWQAGDSIWSRPAIRLFATYAKWNEKWGNANKKDGYIDGMAYRDTATHKFSRGDDDEFTFGAQFEAWWZ

SEQ ID NO: 3570 - protein, 370 aa, Photorhabdus luminescens
MSSVTLHNVSKAYGETIISKNINLEIQEGEFIVFVGPSGCGKSTILRMIAGLEDVTSGDLLINNIRMNDVPPAKRGVGMVFQSYALYPHLSVADNMSFGMKLAGAKKSDIQQRVKQIAEMLQLAHLLDRRPKALSGGQRQRVAIGRTLVAEPSVFLLDEPLSNLDAALRVQMRIEISRLHKRLQRTMIYVTHDQVEAMTLADRIVVLDGGDVAQIGKPLELYHYPVNRFVASFIGSPKMNFLPVKVTATAIDQVQITLPNRQQIWLPVESKGVKVGSNVSLGIRPEHLLPSDIADVTLEGIVQVVEQLGNETQVHIEIPAIHQNLVYRQPDVVLVEEGSTFTIGLPPHRCHLFREDGTACQRLHEEPGVZ

SEQ ID NO: 3571 - protein, 400 aa, Photorhabdus luminescens
MIKTTLKVGARTLALSVLATLVLSASAFAKIEEGKLVIWINGDKGYNGLAQVGEKFEKDTGVNVTVEHPDKLAEKYSQVAATGDGPDIIFWAHDRFGGYAQSGLVTEITPDPSFKDKLFPFTWDAVRYDGKLVGYPIAVEALSLIYNKDLVKTPPKTWEEIPALDKALKSKGKSAIMFNLQEPYFSWPLIAADGGYAFKLENGAYDVKNAGVNNTGAKSGLRFIIDLVRNKHLNIDTDYSIAEAAFNKGETAMTINGPWAWANIDKSKVNYGVALLPTFNGHPSKPFVGVLTAGINTASPNKELAKEFLENYLLTNEGLEMVNKDKPLGAVSLKSYHDILAKDPRIAATMENAKNGEIMPNVSQMSSFWYAMRNAIVNALAGRQTVDAALSDAEARITKZ

SEQ ID NO: 3572 - protein, 915 aa, Photorhabdus luminescens
EFFMSYTTILTLQGLSCMHCVNSVKKALANRTDVEQADITIDYAKIIGKASTESLIETIQAAGYDAMIASQPDVELTLSGLSCMHCAGTTRKALEAVDGVIAAEVNTEKAKVYGKADADTLIAAVERAGYHAKLASGQNSPKSEPLTLPASNRPEPLAAATSSVPVEKADVSVVSDSNESIQLLLDGMTCASCVNKVQKALQGVDGVENARVNLAERSALITGSASPEALIKAVEKAGYGAELIQDETKRRERQQQVSDANMRRFRWQSALALVVGIPVMVWGMMGDNMMLTPENHHIWLTIGVITLAVMIFAGGHFYRNAWQSLKNGSATMDTLVALGTGAAWLYSISVNLWPDIFPPQARHLYYEASAMIIGLINLGHALEQRARQRSSKALERLLDLTPPTARVVTEDGEKEIPLADVKPGMTLRLTTGDRVPVDGEIIQGEVWIDEAMLTGEPIPQQKTKGDNIHAGTTVQDGTVLFTAAAVGSQTTLARIIKLVRQAQSSKPEIGQLADKISAVFVPVVVAIALIAGAIWYFVGPAPQIMYSLVIITTVLIIACPCALGLATPMSIISGVGRAAEFGVLVRDADALQQASTLDTLVFDKTGTLTEGMPQVTDIHTFNGYSEQEVLRWAGALEQGSNHPLAKAILAKAKGLTLPQVEQFRTLAGLGISGEVNGTTLLLGNQAWLEQNQIDTQELKSLIAQQAEQGITPVLLAAGGQAAAVLSIRDPLREDTMTALQRLHHQGYRLVMLTGDNPVTANAIAKEAGIDQVIAGVLPDGKAEVIQKLQAAGRKVAMVGDGINDAPALAQADVGIAMGGGSDIAIETAAITLMRHSLHGVADAVELSKGTLRNMKQNLLGAFIYNTLGIPIAAGVLYPFTGTLLDPVVAGAAMALSSITVVSNANRLLRFKPKFZ

SEQ ID NO: 3573 - protein, 519 aa, Photorhabdus luminescens
MSATLEKTSWWQHSALKWLAVSLCVLFTGYLVVLMYSQGEYLFAMVTLVLLGMGIYVFSNRNTYAWRYTYPGVAGMGLFVLFPLICTIAIAFTNYSSINQLTFERAQSVLMSRQYQSGQALTFKLYPKSDLWVLALSIPSQTKQLVSEPFSLSAMEETTLHVYEQDNLENGEAATLRIITQNRQALNQLVVVLPDGNRLKMSSLRQFSGVHPQYSLGEDGESLTDNQTGTLYRPNTDTGFYQSVNAEGTWGNETLTPGFTVTIGWKNFLRVIQDEGIQKPFLAIFVWTVVFSLFTVVLTVAVGMVLACIVQWEALKGRAVYRVLLILPYAVPSFISILIFKGLFNQSFGEINLLLNGLFGLKPAWFTDPTMARTMLIVVNAWLGYPYMMILCMGLLKAIPDDLYEASAMDGAGPFQNFFKITFPLLIKPLTPLMIASFAFNFNNFVLIQLLTLGGPDRIGTTTPAGYTDLLVSYTYRIAFDGSSGQDFGLAAAIATVIFLLVGALAVINLKATRIKFDZ

SEQ ID NO: 3574 - protein, 297 aa, Photorhabdus luminescens
MAMVQPKSQKWRLLATHLLMFTFIAMILFPLLMVITISLRPGNFATGSLIPENISWEHWKLALGYSVVSPDGRVTPPPFPVMLWLWNSVKVAFITAVGIVTLSTTCAYAFARMHFRGKSTLLKGMLIFQMFPAVLSLVALYALFDRLGEYVPFIGLNTHGGVIFAYLGGIALHVWTIKGYFETIDGSLEEAAALDGATPWQAFRMVLLPLSVPILAVVFILSFIGVITEVPVASLLLRDVNNYTLAVGMQQYLNPQNYLWGDFAAAAVLSALPITIVFLVAQRWLVSGLTAGGVKGZ

SEQ ID NO: 3575 - protein, 675 aa, Photorhabdus luminescens
EGIMWFSRFKLAFIALLLPWLLTVATQMAGRIYLLLTYGSYQLFIDSTQDVERMFWIGGLFDIRIASLLFVPCLLIASLFAINKNSFNIWQHAYPWLATTLNTVVGALTVSNVYYYATYERSFDIFIFGLVEDDTQAVLHTLWNDYPVIESLLCLALFAMTVFWSCLLWQRYLISRTERKTSLPVSAMATLVILTVCFIGMRGSIGTFPLRQSNTQVSEVKMLNMLTPNGPMALNWAFNDHYKNSHFPEATDAQGSWLLNHFLEKPTPANLSPFMAKTADNPTAQKNPPHVIFNVMESMGYHLQSLDRPDLDVFGALRQHWQNDWRFERFISEGDGTIDSLSRFLIRSPNSAVSQSTAQHLDFTSNMFKPYLANGYKIIFVTSGNGAWRNLNQFLPNLGVSEFIDQNGLKKRYPEAKFDTWGVPDEFMFRYIEERLTQAEKNGEHVLIMSLSTTHHPPYKSPAGYQKTDIKLSDTEKQRLSHLASGSELQEVFHTLRYANDQLGQFISWVKSQSLASHTIIAATGDHNIRGISYPDAHELAIGHGVPFYLYVPPAYRQNATFDATRVGSHKDIWPTLYHLSLSHTAYYRTGCNLLAEHLDPIWCQGYNPEVTITQQGAYVMIGKGEFRPWANQTGLLLGDPQPMTADQTKQFKRWQAFTDLLSWQLNRQVHHQQZ

SEQ ID NO: 3576 - protein, 705 aa, Photorhabdus luminescens
MDGLVFTCRIGALPQTTFQVAQFTLQEELSQLYRLTLKVVSSRDDIPLNEQLGDSASLTITRNGVTERTINGLITGAEQGNTDGRSTFYIFTVRPTMWLMTLNQDSRIFHLKSVPEILTILLKDHRILFTRDTLYKRHAEREYTTQKRESAYDFWCRLAAEEGIIFWFEEEQTLFCDCHLGMQADIALTYNTHPETDETDTTAYQWSYGEYLCSNGTVQKDHNFLNPKYSLEHQKQSDDSGHHSVFESYGRFQWDEEGKPFTQLRLEQLRNYSKVGTAKTNCIRLRPGKIFTLQSHPIEAMNARWQLISVTHHGWQPVASDDGGEGTTLTNEVAFIPGNQDWRPPYRYKPLADGDEVATVVGVGSEEIYVNEHGAIRIHFHWNRYDKADDNASCWVRVAQGWNGNGFGFMAIPRVGQEVIVSYLNGDIDRPIVTGCTYNGLNRPPLNLPAEKTRTTFKTRTHGGEGFNELRFEDNKGSEEVFIHAQRDMNSQILRDKTTQIGHDQQTEVAHNRTAIIKNDDDEAVQGGQTLEVGQNQTVTIKGQQALSIGKSHQLNIADNQQITVGKHITVHSESGQIIIGNAGGQIVIDPMGNIRIEGVSITMTDHITGKKSAGALFDYSARYTLLSEQSGKPLAHTRYTITTAGGQTLSGKTDALGRTVIVQSEAEENLQLSSPENPPKPKQTLYQASDNTPVEHVMEFTEKZ

SEQ ID NO: 3577 - protein, 467 aa, Photorhabdus luminescens
HTGRACYGIYGEISMAISNSGKMCPAVTSINCTMEIGVFPADEDPCYLAEKAEYALRLPAMIMTKLGAIRFLNQVIMSGLIKVEELKHDFLWPYKAEVVFAIRGKKDVPLPMLATSLASKQRYSDNLPQSSNPFARPSAEDAEEFGVKRIRRPDIILVKDEALRWPGRNATYFDDSVHPDNLKMLIEVKFPGDKLAEDQEIDYIQIATEDRFGVMRVDDNRTEEQKQYDEAWRKLYQPGSQHYKNPIPLAPLPPGSPPDDEALPVPPAEGVPGTIPQPLTKNPPLLSTSRWSFLPSYEDWVVLGQEVAGLAENGLNYVRDSTRELLAQFGSWLNQTGKWVCEEIIDPISHQVSYAFSWANEQTGKIVTWTESEIKARWQTVQQGSDVTLEELKNISWMQISKEVGEGMLEMVVIVAGVAVVILVTLAVAAALIALVEILAAAAAVSAAALAAVLAILASVTFATASZ

SEQ ID NO: 3578 - protein, 386 aa, Photorhabdus luminescens
RRENMETLDYFAQLRSQLTSFLFTNADELTVSRLGLSITLFFKQGYTLEKKQRILACYRHFREEFGTHLRFHSHSLKGLSKYSPENIIKIEEGILARKKNRLCGWVVSNAKNEDEAPRYLMRYLDSDEDDGDDSSSYLSLVLPWDYLKEQEGMTRFMAWLDFLCEQLEPDSGDCGYCLVLPKDYYDYFPLEYQLAQRYPSLQVNSAVHTAKLQYEHSIRGINWITLLSKRFVNRLGGEYWIRHVLRPYRDVVISSYSNGLIIRAGEYPDLTPLPGSVPESYFAINQLIRPIRVIPREGHSLHFYGEGHFNSTSTLAWYARYDRGPLQVTPLKGDHPALVSGIWQTDSLPGRQYFFAQGAMAFDVEGAETGTTIWHLVREAASMWEZ

SEQ ID NO: 3579 - protein, 449 aa, Photorhabdus luminescens
KVTIQHWSVGSGKPTACRAGSISLLRGRWLLMLKVQRRVQLSGIWYGKRQVCGNNRLSTDSSLTEKMMETVDYFAQLKSQLAAFTFLNGDGLTVSRLGISITLFFKQGYTQEKKQRILACYRRFREEFGTYLRFHRHSLKGLKKYSPENIAKVEEGILNQKKNQLSTWDISDAKNIYEAPRYLMHYLDSDEADGDNSSSYLSLVLPWDYLKEQEGMTRFMAWLEFLCEQLEPDSGDCGYCLVLPRDYHDYFPLEYQLAQRYPSLQVNSAVHTAKLQYGHSIRGINWITLLSKRFVNRLGGEFWIRQVLRPYRDVVITSYRDGLIIRAGQYPDLTPLPGSVPESYFAINQLIRPIRVIPREGHSLHFYGEGHFDDISTLAWYARYDRGPLQVTPLKGDHPALVSGIWQTDSLPGRQYFFAQGVMAFDVEGAETGTTLWHLVREAASMWEZ

SEQ ID NO: 3580 - protein, 421 aa, Photorhabdus luminescens
WLLMLKVQRRAQPSGIWYGKRQVCGNNKLSTDSSLTEKMMETVDYFAQLRSQLTSFLFRNGDGLTVSRLGISITLFFKQGYTQAKKQRILACYQRFREEFGSHLRFHRHELERLKKYSPENIAKVEEGILNQKKNQFSGWVVSDAKNEDEAPHYLMRYLDSREISGDNGSSYLSLALPWNYLKEQEGMARFMAWLEFLCEQLEPDSGDCGYCLVLPNDFYDYFPLEYQLAQRYPSLQVNSAVFTAKLQYGHSIRSINWITLLSKRFVNRLGGEFWIHHVLRRYRDVVITPYSNGLMIRAGQYPDLTPLPGSVPESYFAINQLIRPIRVIPCEGHSLHFYGEGHFNSTSTLAWYARYDRGPLQVTPLRGDHPALVSGIWQTDSLPGRQYFFAQGAMAFDVEGAEPGTTVWHLIRETENTTEZ

SEQ ID NO: 3581 - protein, 338 aa, Photorhabdus luminescens; identical to SEQ ID NO: 778

SEQ ID NO: 3582 - protein, 696 aa, Photorhabdus luminescens
MGEKSLDHLATEAGIVASYINAYGKPQAIPTETRHRLLDAINVNKPANAPVSPLPTVKIFTQGEHFTITLKDEERYQWQIRTEQGEEFQGHCCHKLMLPDTLALGYHRLTLIQGSQCWSMQIIVAPKRCYEPDALLRREKLWGACVQLYTLRSENNWGIGDFGDLKHMLKEIAIRGGAFIGLNPLHALYPTIPESASPYSPSSRNWLNVIYIDINQVEDFKHNEEAQRWWQTATTQRMLQDARNAEWVDYTTVMALKMAALRLAYQQFSTRPEHDPSKTAFHQFVIQGGECLYYQAVYDALHCRLYAENSTYWGWPVWPEKYRDPHGEAVQTFCQSHPQEVEFFLWLQWLADTQLADCFTQSQTSGMPIGIYRDLAVGVAEGGSETWCNRVVYCTKASVGAPPDALGPLGQNWGLPPMNPHVLQSQAYQPFIKLLRTNMTYCGALRIDHVMSMLRLWWIPYGETADKGAYVHYPVDDLMAILALESQRHRCLVIGEDLGIVPEEIVGKLRDSGVYSYKVLYFERHGNGEYRAPEDYPIQAMATITTHDLPTLRGFWQSADLTLGESLKLYPDKNLLQGLYTERQASKQGLLEGLHRYGCIPEHIGDTAKEVGMSPMINQGLHRYIAHSACSLLGLQPEDWLDMDKPVNIPGTVMEYPNWRRKLNTTLETLFGDDHVNQLLKDVDKCRKKAGTARGZ

SEQ ID NO: 3583 - protein, 275 aa, Photorhabdus luminescens
TGAQMGRLIKHLTNILGINALHRYPYPAHDITLAGDRHLHLVGSIHMGTKNMFPLSEILIEQLNQSDTLIVEADITQADSPFHDEFQSYHRIEQRLSSEMYQNFQDCCNEIQQQEEFLNLLPSWQIALILQAGQAQNLGLHPQYGIDYQLLNAAKALGKTIIELEGTESQINLLNQIPNNGLPLLEDTLTHWHANARALQTMISWWMDYQPKQQEHALPTTFSKEIYQLLMTERNKQWNKHLRGLPAGRYLVAVGVLHLYGEGNLPKMLAEKQHZ

SEQ ID NO: 3584 - protein, 801 aa, Photorhabdus luminescens
MQQSRLDKAQFQAALTRQWQRFGLGSAQEMTQHQWWQAVSAALSELVPACPVINHSEQQRHVNYISMEFLIGRLTANNLLNLGWYEDVQAYLAEENIILSDLLEQETDPALGNGGLGRLAACFLDSMATVGQSAIGYGLNYQYGLFRQSFEQGQQIEEPDNWGRESYPWFRHNTQLDVEVNFGGKVVITDDGHETWQPEFTLIGEAWDLPVIGYRNGVTQPLRLWQATHASPFDLDKFNAGQFLTAEQQGVEAAKLTKVLYPNDNHQEGKRLRLMQQYFQCACSVADILRRHLLAGRKIEDLPKYEVIQLNDTHPTIAIPEMMRILLDKHQMSWETAWEITSHTFAYTNHTLMPEGLECWDEDLVSHLLPRHYSIIKEINYRFKKLVDKTWPGEPAVWEKLAVHYNHQIRMANLCVVAGFAVNGVAALHSQLIVKDLFPEYHQLWPNKFLNVTNGVTPRRWIKQCNPALSGLLDRTLNREWINDLDALKTLEPYADDAAFREEYRAIKQSNKILLSNYVNKVMGLKLDPNAIFDVQIKRLHEYKRQHLNLLHILSLYKQIQENPALDIVPRVFLFGAKAAPGYYLAKNIISAINQAAEKINNDPIVRDRIKIAFIPDYKVSVAELMIPAADVSEQISTAGKEASGTGNMKLALNGALTIGTLDGANVEIAEQVGDDHIFIFGHTVEEVKALKAAGYDPLKLLKEDQHLDNILKALASGEFSYSDKRAFDMLLHSLIEGGDPYLVLADFASYCDAHKRIDTLYRDTQHWTRSAILNTARMGMFSSDRTIRDYQQRIWQANRZ

SEQ ID NO: 3585 - protein, 905 aa, Photorhabdus luminescens
MLIPSKLSRPVRLNNTVLRERLLIRLNESSNYRLVLITSPAGYGKTTLVSQWAAGQDNLGWYSLDESDNQPERFASYLIAALQQATQGHCVKSEVLAQKHQYANLPALFAQLFIELSEWRRPIFLVIDDYHLIVNNMIHEAMRFFLRHQPENLTLTILSRNLPSLGVANLRVREQLLEIDSQQLAFDYQETQQFFDKRLTTSLDADDCKRLCNEVAGWATALQLIALSARQSCDAAELSAKRLSGINAGHLSDYLVDEVLNQVGSSTREFLLRSSILRSMNDGLIVRLTGEENGQQRLEETERQGLFIQRMDDSGEWFRFHPLFASFLRQRCQWEMALQLPELHRAAAEGWLAQGYPGEAIHHALAAGDTAMLRDILLQHAWSLFNHSELSLLEECMNALPYEQLLESPRLVLLQAWLAQSQHRYSEVNTLLNQAEQALQQKQIAIEPDLLAEFDALRAQVAMNSGKPEMADKLAKQALAALLPQNEYSRIVATSVEGEVLHCRGELADALARMQQTEQLARRFHVHHYALWALLQQSEILLAQGYLQTAYETQNKAFELIREQHLEQLPMHEFLLRIRSQLLWCWSRLDEAEEAARRGLEVLSNFQPQQQLQCLTQLAKCSLTRGDIDNARRYLARCENLLSNGQYHRDWRTNTDKLRVIIWQSMDDKSAAIRWLAQTERPESVSNHFNQGQWRNIARAQILLGLYDEAESILDTLNQHARELQLISDLNRNLLLCNLLYWHIGRKSEAQSALIEALSLANRTGFISHFVIEGELMAQQLRQLIQLNTLSELELHRAQRILRDINRQHRHKFAHFDESFVTQLLTHPDVPELIRNSPLTQREWQVLGLIYSGYSNDQIAAELDVATTTIKTHIRNLYQKLGIANRQEAIQQAQQLMQMMGLGVZ

SEQ ID NO: 3586 - protein, 404 aa, Photorhabdus luminescens
NIKRTHMQNYILLLLSLALFGPLGIDVFLPTVPAIAEDFKVNNEVIQSTISLFLLIMGLGQLISGPLVDKFGRRPVALTGITLYIIGSVIAALSTFPEMFIAARIIQGCAVCCTSVVCISGVRDRLNGDEAAKAYGFINGTLNIVPALAPLLGGILAEMFNWRAPFWFLTCYSVIALLIIANWLPETRPANTKPIRGLPLKQYFQILSNAQFMHFALVNAGIMGIVITYVSFAPTVLMTEGHISPLAFSLIFGGNGLWTMIAFLTANKIIHRLGRPCCLLLGTILMALASLSLFSGMHLPTVASQHWLSYMLPVSFACTGMAFVMGPATSYALEPYSDEAGVASALIGFVQMAVGSALSLIAMALPFSLKQSLVLVMLLGTTLILSAHILSRNLKGRVVSLEPZ

SEQ ID NO: 3587 - protein, 424 aa, Photorhabdus luminescens
LIKVIKMMENGKRFEDMLSRFVGNGPYLEIDGEKYIDAASGTFNLPLGYTNRRITEKLKQQIDRCTHLSSAYTHEMSQYILDKLVKHSPKGIDRIWLRDVSGSGAVECAIRIAQKATGRSGVISFFLAHHGQSLATAQISGNAFRIKDFHVNIDGSFKIPTPTSVMSELEPNTESNQYFDLEQFIQLGSNDNIACLIIEPIQGNGGNNVFPVDFYRKIRDICHKHDIIIIADEVQTGFGRTGTFFASTGYAKELEPDIIVFAKGAGGIGIPTGGVLMRSSLDVLESFEHSSTSGANPLSLTALNEIIDIIEEEQVLENVQRNETYLRDGLLALQHKYPEITGVRGVGYMFGFDTPSPEFAAQAIAIANSHHLIIRGSRYGKGRALKVRPPLICTQEHLNEILYKLDLTFADMTLNMLDTKEVAZ

SEQ ID NO: 3588 - protein, 367 aa, Photorhabdus luminescens
YDVKYAGYQGGSVMKALKFNRVWDVQIQDVEPLRCAEPDDVVVDIAVCGVCGTDVGIITGSYPVAIPGTTLGHETTGVITQIGKSVTRFNVGDRVVINPTYSCGHCRMCQTGSPNHCEKKLGTEAGVSYDGAFAEQYLAKESSLIKLDDHVSMEEASLTEPLSCTLTGVDKLGITHTNIRAAVAGAGPMGMLYIWALHARGVKAFMVEKNESRIQFAKENLPPECELYTDFDEALIQKYGDKSALIDLCVDTTGQLTEYVFEHLAPGGKLLNVALKDKHANLDILKIADKSLSVIGSIDSLNNSFERAYTMIRDGVIPAGRLVSQVFDFNDYLQAFLTVGCDIANKSQKPLFTPNCKVLIRISDLKZ

SEQ ID NO: 3589 - protein, 217 aa, Photorhabdus luminescens
NNGMFHMDRFNVIFDIDGVIVDSEQLHFDVLCDLAPDYTQHVQPQQLIGLSLEETLDYIGVPAQQQKEITAQIVSVYKSKLAKSYLRPGISRLILALQQHRIPFGFVSTAPREVCLANIGLLELSESPALISGDDVERTKPHPDPYLAMLKLKSMDVHQTLVIEDTDLGITAATQAGIPYVYAWPHALSVAEQYQQATRIIGALTDIPQFSKINFGZ

SEQ ID NO: 3590 - protein, 388 aa, Photorhabdus luminescens
KEHELSDQNIVSLVKQPIMATRAAFFIAGFSLASWAPLIPLAKERLQLDNGAMGLLMLAFGIGSFIMMPIAGMLAARFGCRQIFTLCALVVLVMLPGLSVLPTPLTLACVLFIFGAGIGAMDVVVNIHAVMVEKMARRPIMSGFHALFSLGGIAGAGSVSALLSLGISPLQAMVMVVLLVILLLLPVWSGLLNEAESDNTPFFAMPHGIVILLGFLCFVAYIMEGSMLDWSGILLTSVHNISSHQAGIGYTLFAIAMTSGRFLGDKIIALYGHRRVFISSALLATSGFILIYSASTAIMLGLSFLMIGAGLSNIAPMLFTASGQQKIMPDSLAVAAVSTMGYSGILLGPAIIGGLAHIVTLHGAFACIALLSISLLAGYKLINSSGRZ

SEQ ID NO: 3591 - protein, 194 aa, Photorhabdus luminescens
MGLSQYHWLNEPSDWQCGSGWLNVTTDHKTDFWQRTWYGFERHNGHVFGRYVEDDFTFQLCIEGCFEHLYDQAGVMLLVDEKHWLKGGIEYSDGHASIGSVLTRHHSDWSMGVFPGDASKFWLRLTREEGYLRLQYSTDGFRWPLLRLSPFFEDKQPVFVGAMCCSPERHGLQVRFSDFQLTPPIKKPLHDLSZ

SEQ ID NO: 3592 - protein, 356 aa, Photorhabdus luminescens; identical to SEQ ID NO: 52

SEQ ID NO: 3593 - protein, 408 aa, Photorhabdus luminescens
IILSSWPGKSKTTRCCIQSTDRFPESALMTNHLTNSNFSYRWQQLSWDDITLRIHSKTAQDVEQALSSNKLNLDDFMALLSPAAKPYIEPLAQRAQKLTRQRFGNTVGFYVPLYLSNLCANDCTYCGFSMSNRIKRKILNKDEIIAECQAIKALGFNNLLLVTGEHQGKVGMDYFRHYLPLIREYFSSIMMEVQPMTQEEYSELKTLGLDGVMVYQETYHQPTYLLHHLRGKKRDFHWRLETPDRLGRAKIDKIGLGALIGLSSHWRTDCYMVAEHLFFLQRTYWQSRYSISFPRLRPCTGGIEPASLMSEAELVQLICAFRLFAPDVELSISTRESPFFRDHIIPLAINNVSAGSKTQPGGYADSRHEELEQFMPHDNRSVYQVADALIKAGLQPVWKDWDNYLGRZ

SEQ ID NO: 3594 - protein, 553 aa, Photorhabdus luminescens
MKLSFKTSACALVVSIALLPAIANAWEKDKTYDITILHTNDHHGHFWHNDYGEYGLAAQKTVVDEIRQEVVKKGGSVLLLSGGDINTGVPESDLQNAEPDFKGMNLVGYDAMALGNHEFDNPLSILRQQEKWATFPFLAANIYQTSTGKRLFKPYTIFDKQGVKIAVIGLTTDDTAKIGNPANFPDVEFRLPATEAKMVVEELKRDEKPDVIIAATHMGHYDNGNHGSNAPGDVEMARSLPAGYLDMIVGGHSQDPVCMSAENKNYKQIDYVPGTPCSPDRQNGTWIVQAHEWGKYVGRADFQFRNGELKLTHYQLIPINLKKKVQKEDGSTERTYYTHEIAQNPDMLKLLMPYQDKGDKQLGVKVGSVEGKLEGDRSKVRFVQTNMAHVVLSAMMERADADFAIMSGGGIRDSIESGDITYKDVLKVHPFANTLVYVDMKGNEVKQYLAAIANMKVDSGAYAQFVNVSLIADGKSVKEVKIGGNPLDPHKTYRMAMLDFNAIGGDGYPRVDNYPTYVNTGFVDAEVLKDYIEKHSPLKAADYEPKSEIIYQZ

SEQ ID NO: 3595 - protein, 256 aa, Photorhabdus luminescens
MLKIADTTFHSRLFTGTGKFANANLMTQAIAASGSQLVTMAMKRIDLQSGNDAILAPLQKLGVKLLPNTSGAKTAEEALFAARLAREALATNWIKLEIHPDVKYLLPDPIETLKGAEMLVKDGFVVLPYCSADPVLCKRLEEVGCAAVMPLGAPIGSNQGLLTRDFLQIIIEQAQVPVVIDAGIGAPSHALEALELGADAVLVNTAIAVARNPVKMAQAFRIAIEAGELSYQAGRASPKQHAVASSPLTDFLRVLZ

SEQ ID NO: 3596 - protein, 250 aa, Photorhabdus luminescens
MLNDQEFMRYSRQLLLEDIGPEGQEKLKSSHVLIVGLGGLGAPASLYLAGAGVGTIYLADDDHLHISNLQRQILYRTEDIPSAKAELAANQLNALNPLIKTMVLNQRQNLESLTTIVKQVDLVLDCCDNMTTRHAINAACVATRKPLISGSAVGFSGQLMVFEPPYLHGCYNCLYPEQQEPLRNCRTAGVLGPIVGIIGTLQALEAIKMLTGLPSPLSGKLRLFDGKQQSWSTLQLNRSQQCPICGDMAZ

SEQ ID NO: 3597 - protein, 217 aa, Photorhabdus luminescens
MNNLPNAPFAPTEHRLGLYPVVDSLAWISRLLQTGVTTIQLRIKDLPEDQVEEEIQQAIMLGRQYNARLFINDYWRLAIKHGAYGVHLGQEDLVIADLNAIQKTGLRLGISTHDEQELARAKSLRPSYIALGHIFPTTTKAMPSSPQGVEALKRQVENTPDYSTVAIGGISLERVPDVIATGVGSVALVSAITKAKDWRQATAQLLYLVEGIELKGZ

SEQ ID NO: 3598 - protein, 649 aa, Photorhabdus luminescens
EFAMSHNTVIPTTDISPKPDPARPRKAQRDAAQEFINSIQGVTFPNSRRIYLQGSRDDIQVPMREIQLSPTLIGGTKEEPQYEENEAIPVYDTSGAYGDPDAKLDVHVGLTQLRQPWIDERQDTEPVAALSSDFTQQRLTDAGLDHLRFNHRPHPLKARKDKRVTQLHYARQGIITPEMEFIALRENMGRERIRGDVLRQQHPGQSFGAQLPENITPEFVRQEVAAGRAIIPANINHPESEPMIIGRNFLVKVNANIGNSSVTSSIEEEVEKLIWSTRWGADTVMDLSTGRYIHETREWILRNSPVPIGTVPIYQALEKVNGGAENLTWEIFRDTLLEQAEQGVDYFTIHAGVLLRYVPMTAKRLTGIVSRGGSIMAKWCLSHHQENFLYQHFREICEICAAYDVSLSLGDGLRPGSIQDANDEAQFAELHTLGELTKIAWEYDVQVMIEGPGHIPMQMIRRNMTEELEHCHEAPFYTLGPLTTDIAPGYDHFTSGIGAAMIGWFGCAMLCYVTPKEHLGLPNKDDVKQGLITYKIAAHAADLAKGHPGAQIRDNAMSKARFEFRWEDQFNLALDPDTARAYHDETLPQASGKIAHFCSMCGPKFCSMKISQEVRDYAAGMEQMSEAFRAHGSELYHSVEDVSHEQSAZ

SEQ ID NO: 3599 - protein, 221 aa, Photorhabdus luminescens
MSQLLAVFDLDDTLISGDSSAIWTTFLWEKGVITDPTFIEADKKMMADYSAGSLDMNDYLAFSLQTLHQVPQEQVDLWLTEFVNEKIRPRFYPQAKALIAEYQQQQIPIMIISATVSFIVKKIATELNIHTALGIDMVIENGCYTGKIDGIATFREGKVKRIKQWLEQKNSYPKIIRFYSDSINDLPMCQFADEVITVNADAHLKTEAQQHGWQQLTWSLZ

SEQ ID NO: 3600 - protein, 258 aa, Photorhabdus luminescens
MMMQQQITGTEHGWWIISNENRIWLPKGELPFGMATQWSLQGKIALPIGEWQGEKVWLIRQKMVSNMVSLRQIVASDRGLFQLAGRGVQLAEFYRSHQYCGYCGNEMHHSVSEWACLCHHCHERYYPQIAPCIIVGIRRDDHILLAQHQHHRGGVYTVLAGFVEVGETLEEAVVREVMEESNIKIRNLRYVASQPWPFPHSLMMAFLADYDSGEIRHDPQELISADWYHYDQLPLIPPHNTIARRLIEDTIVLCRNTZ

SEQ ID NO: 3601 - protein, 355 aa, Photorhabdus luminescens
MNALKNDRYLRALLRQSVDVTPVWMMRQAGRYLPEYQATRAKAGDFIALCKNTELACEVTLQPLQRYPLDAAILFSDILTIPDAMGLGLYFEAGEGPRFKSPVFSRADVEKLPVPDPEMELSYVTDAVRAIRKALAGQVPLIGFSGSPWTLATYMVEGGSSKAFTKIKKMMYAEPTVMHLLLDKLADSVILYLNAQIKAGAQSVMVFDTWGGVLTGRDYREFSLHYMHKIVDGLIRENEGRRVPVTLFAKGGGQWLEAMAETGCDALGLDWTTDIADARRRVGNKVALQGNMDPSMLYASPERIEQEVSTILQGFGTGSGHVFNLGHGIHQDILPEHAGVFVEAVHKLSAKYHQZ

SEQ ID NO: 3602 - protein, 334 aa, Photorhabdus luminescens
HCLLKVVDNGWKQWLKPVVMRLVWTGRQILPMHAVVWGIKSLCRVIWTHLCYTPLQSGLSRKFRQFCKVLGRVLVMSLTLVMVSIRIYCRNTRGYLSKRYINFQLNIISKNMINTKALRQEQIAKAQQVICYDDFSPPKLIAGADVGFERQGAITRAAIAVLSYPALELVEYQIARIETTLPYIPGLLSFREYPALMAAWQLLKYKPDLVMVDGHGIAHPRRLGVASHFGLLANVPTIGVAKRRLCGESELLGEQPGSCQPLLDKEEQIGWVWRSKKRCNPLYISTGHRISLDSALLWVERCMKGYRLPETTRWADGIASNRPFFEQMIQKNPZ

SEQ ID NO: 3603 - protein, 235 aa, Photorhabdus luminescens
LQKRKNRRGIIYPLLLVRQGLMTLGFVFALSACTNQPKEPSFSASGFIADDGVVRLWRLNDQNSKPRVLMSVYSPYRNDNTVVTFYEYKQGDLRQIRREILNDKNPLSEQLRLNKSGDVIFMQKQSKTRRERLSSDDIVRMQFDAKRTLELSDALIVGNVRLVQGHWNNGKVTTCAGETISLEFEPYARSWLEQREKSSYSQLTIAWLEAPAGRELLLVANNDFCRWEPTKDSLZ

SEQ ID NO: 3604 - protein, 410 aa, Photorhabdus luminescens
LAANMSEQSNTTIVPSHPKKTRNTVFTILGAISVSHLLNDMIQSLILAIYPLLQLEFNLSFVQIGMITLTYQITASLLQPLVGLYTDKHPQPYSLPVGMSFTLSGLLLLAYANNFPLILLASALIGTGSSVFHPESSRVARMASGGRHGLAQSLFQVGGNFGSSLGPLLAALFIAPYGRGNVGWFSLAALLGIIVLLQISKWYNVQNYIKKNQAKTGPAIKVLSRKTVIGSLVILLILIFSKYFYLTSISSYYTFYLIHKFGISVQSAQFHLFIFLFAVAAGTIIGGPLGDRIGRKYVIWISILGVAPFTLALPYASLYWTSILSVIIGVVLASAFSAILVYAQELIPGKTGMVSGLFFGLAFGMGGIGAAVLGDIADRTSIELVYQICAFLPLLGIFTALLPNIEDKNZ

SEQ ID NO: 3605 - protein, 429 aa, Photorhabdus luminescens
LMNILIVGSGGREHALAWKAAQSPLADKIYVAPGNAGTALESNLENIDISATDINGLLVFAQSHDIGLTIVGPEVPLVLGIVDAFQTAGLTIFGPTQAAAQLEGSKAFTKDFLARHQIPTAAYQNFTAIEPALAYLDKVGVPIVIKADGLAAGKGVIVAITREEAQSAIKDMLAGNAFGDAGHRIVIEEFLTGEEASFIVMVDGKNVIPMATSQDHKRIGDGDSGPNTGGMGAYSPAPVVTNEIHQRIMEEIIYPTVNGMAAEGHVYTGFLYAGLMISQNGEPKVIEFNCRFGDPETQPIMMRMRSDLVELCLAGAKGELAGKTSDWDERPALGVVLAAGGYPADYHKGDIIHGLPQQENESSKVFHAGTAMKDNDVITAGGRVLCVTALGETIIDAQKNAYQQAEEIEWNNCFYRKDIGYRAINRLKZ

SEQ ID NO: 3606 - protein, 530 aa, Photorhabdus luminescens
MQQLRPIHRALLSVSDKSGVVEFAKALSQRGVELLSTGGTARLLAESDLKVTEVSDYTGFPEMMDGRVKTLHPKVHGGILGRRGQDDEIMAQHQISPIDMVVVNLYPFAQTVAKPDCTLADAVENIDIGGPTMVRSAAKNHKDVAIVVNSKDYKKIIEEMDNNQGSLTQSTRFDLAIKAFEHTAAYDSMIANYFGKLVPPYHGDTTQPSGRFPRTLNLNFIKKQDMRYGENSHQDAAFYIEENLSESSIATATQLQGKALSYNNIADTDAALECVKEFVEPACVIVKHANPCGVAIGKDIHEAYDSAFKTDPTSAFGGIIAFNRELDIKTAQAIIDRQFVEVIIAPSVNKDVLPVLATKQNIRVLVCGEWEDRAAGLDFKRVNGGLLVQDRDLGMVAVTNLRVVSKRHPTEQEMKDALFCWKVAKFVKSNAIVYAKNDMTIGIGAGQMSRVYSAKIAGIKAADEGLEVQGCAMASDAFFPFRDGIDAAAAVGVSCIIQPGGSIRDDEVITAADEHGIAMIFTGMRHFRHZ

SEQ ID NO: 3607 - protein, 336 aa, Photorhabdus luminescens
HELKEELLEAEKTGANKQTIYDKFKERSEKNRQEGVADNCSHNPGCVVSVWEMMNSGTDVASGLNRTSFFSSLSSEEMAQLNRFVQAENAESAQAIYQSLPDVVKKVVEGKEFAEQFGVMPKVGGSSGIIGLGIAGKKPATKDTGNTGTKGTNAAHNQQVNKSNLATAEKDIVLIEQGKKGGWSKVLNKPEPNKIYHVRHASGEKIYHTDGLSRPVHIETSLHLSKNDRNTYQQCKAGKCGNPGDEGGHLIASIFGGPGERLNVVPMDGNLNKGAWKQMENSWAKELKAGKKVDVKIQPIYSDNSNRPVSFNVTYKVDNERPIRLNIDNVPGGKKZ

SEQ ID NO: 3608 - protein, 612 aa, Photorhabdus luminescens
TKKSDFKTEHHSVSISTGGSAGGMFLSNLAANTLGGANREGHAQSTTHAAVSDGTLIIRDKDHQQQDVTTLSRDTDHANNALSPIFDKEKEQQRLKQAQLIGEISAQVIDIASTEGAIIATKAANAKLENISDPDREAAIKVLKDKGKTDITPALIKDQIYKTAYNAALNESGLGTGGKYHSALQAATAAIQGLAGGNIGQALAGGASPYLAGVIKDLTTDPKTHQVDVVTNTLAHAILGAVAAEVSGNNALAGAAGGELAARELMKHIHGENAKVSDLSEEEKQTISTLSTLAAGLAGGIAGDSTGSAVTGAQAGKNAVENNFLKAGQITSWLEKYKASSTDEEKNRLIEVASKADQDQQQKAIETKISKDYLMKQQEELIKLIQSPNCDADCTKLTEYSLNQISPVIDNYDTLQKSNNIPRAVIATISLALPTLAKTATPAVTNWIGSTTIANRAIGVGTTGLANLGMQGYNIYNNPQENFSYTSFGTSLITGGATAGMGYWGTAATNTLGAGVSSVIDGNSPWLPMGGAFVGSSVGYGVTKGTTNYLDNKMNPWSNGFKERFNLINPSISAPPLVSPAPGIVGSAVGAVGSETANKVIMDELSSKDKKZ

SEQ ID NO: 3609 - protein, 1009 aa, Photorhabdus luminescens
ADIASSDLVEHSKQTSKGLLSKSSVETHDEVHERRAQSTTLSGDRVTLQTGNDLNIIGSNVAGTQDVHLAAGNQLTITTADEARHETHFKQEKKSGLMGTGGIGFSVGKASQKSTTDIDSNLNKGSTVGSSQGSVTFSAGKQLSIHGSDVVAGRDTQLSGQNIHITSAENSHTAITKTEQKQSGLTVALSGTAGGALNSAVQTVQTANNESDSRIKALQGTKAALSGVQAVQAARLADAKGGDDKANNNLVGVSLSYGRQSSRSELKQHQTTQHQHGDIRIQGGQLQAGKDLQLNASRDIQLSSSQNTEQTTGKNSSRGSSLGVGFTAGPGGTGINLSASTNHGKGRESGNGVSHNETTLDAGQTVTLNAGRDASLKGAQVSGEQITADVKRHLTLSSEQDSNRYDMKQQNVSAGVSVTLGPQPGGSLNLSASRDKIHSNFDSVQEQTGLFAGKGGYQVKVGEHTQLDGAVIASTADKDKNTLDTGTLGFGDIKNKADFKTEHHSVSISTGGSAGGMFLSNLAANTLGGANREGHAQSTTHAAVSDGALIIRDKDKQQQDVTTLSRDTDHANNALSPIFDKEKEQQRLKQAQLIGEISAQVIDIASTEGAIIATKAANAKLENISDPDREAAIKVLKDNGKTDITPALIKDQIYKTAYNAALNESGLGTGGKYHTALQAATAAIQGLAGGNIGQALAGGASPYLAGVIKDLTTDPKTHEVDIVTNTLAHAILGAVAAEVSGNNALAGAAGAAGGELAARELMKHIHGENAKVSDLSEEEKQTISTLSTLAAGLAGGIAGDSTESAVTGAQAGKNAVENNALSLPKGMSDYGRAQSSLAMKMYKEGATPDQISEELARQARGTHPEGQDPARGLIVAWGNFFGVPLDVVMSNEKMTPEKAAEIVTSGIPTSEAKVMQYVAAKAFLALAKNPVSGSKAEGSSPQWKVGEGKFSPKDKGTVTNVEHPVGKFDGKSLPNGKENIASDKTIKNDVLEHQRVGSGEKGTVVEIKZ

SEQ ID NO: 3610 - protein, 239 aa, Photorhabdus luminescens
SQGFIIFICGWGNIQCSRVQNGIWVSAQTSLVRKNGHSIFHNEKNKPHYFEWGLPAVCKAVHFFYLSDQEYDIKGFIDKFEENSKFLCNVFSAIVGLHIKRIFLKELEENYEIEPEFYNSRIYLSAEKRGNIIDAFETVLPYYLAPKQNSQYEHIYLQPRGDDLLYFVSPCNSPNQTIAKENLIYNILTMDKEGKQINAMEQNITSIFLRSFTNDILRLREVSKSSLFEKIAKIYIENZ

SEQ ID NO: 3611 - protein, 386 aa, Photorhabdus luminescens
PAVHTINKNIGVWLTNLVGHVLHKEADMRIACGFNPNFLSGEIHIPSKVSMIELGITAYNILSVAEKRTPFERYNGKFSLHIARSAITEDIQSGCNYINNIMPRIINTEKTISIGFHLCGNRKDNIGKYGFTPHYERSKRKERNAINFLKRVSHTYQIDTWIENSNFYSGGPSEISNAIISANYISKESNSKQIVDLAHLIINSVNAKVDPLIFIGMIDWDNVVEVHLSGIIEGKDGAFHDGHPERIHHIVWDSFEKIVSSKLIKKNFYINIEHTENSWLKNLSGYNNDFEKLNSILLKNKETSKPSNTNMSNYAKSYLSKTLLAAIKNKKEIEIAKSENIESLISSWILSIEESEVNLCLTKEEEDETINSVHYLKSFESFVNRZ

SEQ ID NO: 3612 - protein, 261 aa, Photorhabdus luminescens
IMKIGTNWSGNRELSVLKEIISLRKVDFIEILIDNFLQCTPDSILGISKGLPIAFHIMNSKYMHRSKQDLESIGKRIKLLQKELNPIYISDHVGIFYHNSYPLPTMGEIDYSSEKDKYFDSVSLWQDIIGEKIYLENFPSILDENAKLQPDFFKEMTKKCGNGLLFDISNAVIAQENTGTPFEEWLDIEMNHLHIGGYAETSLRPSFLVDTHADRISNLSLKYFNKLGTESKDNLTSLSVERDDNFVLGDWINDIELCRQZ

SEQ ID NO: 3613 - protein, 420 aa, Photorhabdus luminescens
LRLILWIMDIMMEEKKLYIFDKGIILPSITMFKSRMLNMAMQLIITALIYQLSTDDAGFFLLSSQLVQIFVVASCTFFIGINIKSDIKNKNYTYENYTWLLITGTVIGLLITLISVVSIHYYSDHTVTKKIAWILSIGIIPLCIYSVNCAILESTKQERYMVKVNSFSILTNVFALIALYLFTGDLIFSIALAISISRAYMAISSSIPLIKFIKWKKVDLPYIKDIVNIGINEALTSTSLVILMSILIRFVSTLISNIELSKLFVYMGVMNYLFVTGFSAVISLAANYRSDENNFLNIAIGTNLFYLIIFSTVSPLISLMVFNTLTETIDIITCALVIFFDLISLSIINRIRSKSPNSKSVYLKVIPITTILVVTSTLISPTSFEILLIFVCSNILYTLISLIWYSLWKKKSLFLEKLTZ

SEQ ID NO: 3614 - protein, 456 aa, Photorhabdus luminescens
MTTSRSVLDMIGNTPLLELTHLNTGPCQLFIKLENQNPGGSIKDRVALSMIEQAEEQGLLQSGGTIIEATAGNTGIGLALVAALKGYKLILVVPDKMSREKVFHLRALGTDVRLTRSDVSKGHPEYYQDYALRLAQEIPGAYYIDQFNNPANSAAHTTTTGPEIWQQMDHNVDAVVIGVGSGGTLGGLSHYFAQVSPETEFVLADPTGSILVDYIEHGKYGEAGSWQVEGIGEDFVPPLGNFSRVHHAYRVSDAEAFSSARDLLLKEGVLAGSSSGTLLAAALRYCRAQTTPKRVVTLACDSGNKYLSKMFNDYWMLEQGFQSRVQQHDLSDYITYRYQDGATVFISPEDTLKTAHTRMRLYEISQLPVLKEEQVVGIIDEWDLMHTVQADPRNFSLPVSHAMTHQVRTLDKNDSLQQLMATFDAGHVALIVDNGRFLGLVTRTDVLNAWRQQLNZ

SEQ ID NO: 3615 - protein, 569 aa, Photorhabdus luminescens
MEHSTPLITTLVGGFFIAYLLGMLAQRLKISPLVGYLTAGVLAGPFTPGFVADASLAPELAEIGVILLMFGVGLHFSLKDLLAVKSIAIPGAIAQILVATLLGVGLSAILGWELFSGIVFGLCLSTASTVVLLRALEERQLIDSQRGQIAIGWLIVEDLAMVLTLVLLPAAAGILGNKEANIGQLIMELAMTVGKVIAFILLMIVVGRRLIPWVLAKTASTGSRELFTLAVLVIALGIAYGAVALFDASFALGAFFAGMVLNESELSHRAAQDTLPLRDAFAVLFFVSVGMLFDPMVLIQQPLSILATLAIIIIGKSAAAMLLVKMFGHSRRTALTISVSLAQIGEFAFILAGLGVALGLLDGNARNLVLAGAIVSIMLNPVLFSLLDRYLEKTETIEEQLLEETLEEETQIPVDICGHTIVVGYGRVGSLLCQRLQEKEIPLVVIENTRAKFEELGEQGISAVMGNAASKDIMSLARLDCACSLLLTIPNGYEAGEIVACAREARPDINIIVRADYDDEVTYITERGASHVIIGEHEIAKTMATVFANSEQSYSIEPPPASPFSPSLZ

SEQ ID NO: 3616 - protein, 385 aa, Photorhabdus luminescens
MTKFDTKTVHAGYTPDHTGAVMPAIYATSTYAQSAPGQHTGYEYSRSGNPTRDALESAIAELENGSRGYAFSSGLAASSTVLELLDKDSHLVAVDDLYGGTYRLLEKVRSRTAGLRVTYVEANDISGLEAAIRPDTKMIWVETPTNPLLKLADLTAIAQIAQRHSIISVADNTFASPYLQRPVDLGFDIVVHSATKYLNGHSDVIAGLAVVGKNAELAEKLGFLQNSVGGVLDPFSSFLVLRGMRTLALRMQRHIDSASKIAHWLEQQPQIETVFYPGLASHPQHELAKRQMKGFGGMISVHLKGDDDYARRLIQELKLFTLAESLGGVESLISQPFSMTHASIPLEKRLASGITPQLVRISVGIEDAEDLIADLAQALEKAAQZ

SEQ ID NO: 3617 - protein, 239 aa, Photorhabdus luminescens
MATPHINAEMGDFADVVLMPGDPLRAKYIAETFLENVRQVNDVRGMLGFTGTYKGRPISVMGHGMGIPSCSIYAKELITDFGAKVLIRVGSCGSVRHDVKLRDVVIGMGACTDSKVNRIRFKDHDFAAIADFDLVRNAVDAAKAKNINVRVGNIFSVELFYTPDPQLFDIMEKYGILGVEMEAAGFYGVAAEYGAKALTICTVSDHIRTHEKLTAEERQTTFNEMIEIALESVLLGDKZ

SEQ ID NO: 3618 - protein, 408 aa, Photorhabdus luminescens
MKRTFIMVLDSFGIGASKDAEKFGDQGSNTLGHIAEACARGDADIGRKGPLYLPNLSRLGLGKATEESCGTFPAGLDKDADIIGAYAYASELSSGKDTPSGHWEIAGVPVLFDWGYFKDEENSFPQALLDKLVERANLPGYLGNCHSSGTVILDKLGEEHMKTGKPIFYTSADSVFQIACHEETFGLDRLYELCEIAREELTDGGYNIGRVIARPFVGDKAGNFQRTGNRHDLAVEPPAPTILKKLVDEKNGEVVSIGKIADIYANVGITQKVKATGIDALFDATLVEMEKAGDNTIVFTNFVDFDSSYGHRRDVPGYAAALELFDRRLPEMLKRVKNDDILILTADHGCDPTWSGTDHTREHIPVLIYGPKVQPGSLGHRETFADIGQTVAKYFELSPMEYGKSMLZ

SEQ ID NO: 3619 - protein, 260 aa, Photorhabdus luminescens
MTDLTAAAQRALSLMDLTTLNDNDTDEKVTALCHQAKSLAGNTAAICIYPRFIPLARKVLREQGTPEIRIATVTNFPHGHDDIDIALAETQAAIAYGADEVDVVFPYRALMASNEQVGFEMVKACKVACAEADVLLKVIIETGELKEASLIRKASEISINAGADFIKTSTGKVPVNATLASAEIMMKVIHEMGVGETVGFKPAGGVRTAEEAAQYLALADHIMGDKWVDARHFRFGASSLLGNLLNTLGHQGQKQSSHYZ

SEQ ID NO: 3620 - protein, 426 aa, Photorhabdus luminescens
MQLFMSLVGMVVLILIAVLFSSNYRAIKLRTVLGAFLIQIAIGAFVLYVPAGKKILMGMSEGVSSVIQFGQQGMDFIFGGLVSPKMFELFGGGGFVFALRVLPIIVFFSSLIAVLYYIGVMQLVIKVLGGGLQKILGTSRTESLSATANIFVGQTEAPLVVRPYIATMTQSELFAVMSGGLASVAGSVLAGYASMGVPLEYLIAASFMAAPGGLLFAKLMVPETEKPRDTVDAMSLVAEEERPANIIDAAASGAASGMQLALNVGAMLLAFVALIALLNGILGGIGGWFNYPQLSLELVLGWVFAPIAYLIGVPWNEATVAGSFIGQKIVVNEFVAFMNFGAYLKPDDVVMAAGLQVLSDHTKAIISFALCGFANLASVAILLGGLGGMAPNRRGDVARLGMKAIIAGTLSNLMSATIAGFFLALZ

SEQ ID NO: 3621 - protein, 232 aa, Photorhabdus luminescens
MKANMLEERLREFLKHRLAHSNDNAHDIGHLIRVANNAKRIMEKEGGEPLIIIASSYLHDIVSLPKDHPEKKQSSKLAAQEAVKILSIEFPEFPKELYDAVEHAIITHSYSANLPAKTIEAKILQDADRLDALGAIGLARVFYIAGMLGQGLFHHDDPFALNRPLDDKSYTIDHFQTKLFKLPEKMNTTEGKKIAQLNAQYLVDFLSKLSSEIKGDLINTDEFIKDFFKENZ

SEQ ID NO: 3622 - protein, 216 aa, Photorhabdus luminescens
LQQVSELACSYPAIYAALGLHPLYIDQHQEAHLADLESFLKQKHEKLVAVGEIGLDLYMTEPQFEKQKALLCDQLRLAKQYELPVILHSRKSHDQLAAILRRINLHRTGVVHGFAGSLSQAEAFIGLGYYLGVGGTITYERAQKTRRVMAELPLTSLVLETDAPDMPLFGFQGEPNRPEKIAGVFASLCELRREAPDEIARQLYHNSVELFGLIIZ

SEQ ID NO: 3623 - protein, 1486 aa, Photorhabdus luminescens
MQDSPEVSITTLSLPKGGGAINGMGEALSAAGPDGMATLSLPLPLSTGRGTAPGLSLLYSSSAGNGPFGIGWQCGVMTISRRTQHGIPQYGNDDTFLSPQGEVMNIALNNQGQPDIRQDVKTLQGVTLPISYTVTRYQARQIVDFSRIEYWQPASGQEGRAFWLISSPDGQLHILGKTAQACLANPQNDQQIAQWLLEETVTPTGEHVSYQYRAEDETHCDDNEKTAHPNATAQRYLVQVNYGNIKPQTSLFVLDNTPPTPEEWLFHLVFDHGERDTSLHTVPKWDAGTAQWPVRQDIFSRYEYGFEVRTRRLCQQVLMFHRTALMAGEAGTSDAPELVGRLILDYDRNASVTTLIAARQLSHEPDGSPITLPPLELAWQRFNLEKMPTWQRFDALDNFNSQQRYQLVDLRGEGLPGMLYQDRGAWWYKAPQRQEDGDSNAVTYDKIAPLPTLPSLQDNASLMDINGDGQLDWVITASGIRGYHSQQPDGKWTHFTPINALPVEYFHPSIQFADLTGAGLSDLVLIGPKSVRLYANQRNGWRKGQDVPQSTGITLPVTGTDARKLVAFSDMLGSGQQHLVEIRANRVTCWPNLGHGRFGQPLTLPGFNQPETSFNPERLFLADIDGSGTTDIIYAQSGSLLIYLNQSGNQFDAPLTLALPEGVQFDNTCQLQVADIQGLGIASLILTVPHMAPHHWRCDLSLTKPWLLNVMNNNRGAHHTLHYRSSAQFWLDEKLQLTKAGKSPACYLPFPMHLLWHTEIQDEISGNRLTSAVSYSHGVWDGKEREFRGFGCVKQTDTTTFSHGTAPEQAAPSLSISWFATGIDDVDSQLATEYWQADTQAYSGFETRYTVWDNANQTDQAFTPNETQRNWLTRALKGQLLRTELYGLDGTDSQTVPYTVSESRYQVRSIPVEKETELSAWVTAIENRSYHYERIISDPQLSQSIRLQHDIFGQSLQSVDIAWPRREKPAVNPYPPTLPEALFDSSYDDQQQRLRLVRQKNSWHHLTDGENWRLGLPNAQRRDVYTYDRTKIPTEGISLEVLLKADGLLADEKAAVYLGQQQTFYTAGQSEVTLEKPTLQALVAFQETAMMDDTSLQAYEGVIEEQGLNTTLTQAGYQQVARLFNTGSESPVWVARQGYTDYRDATQFWRPQTQRNSLLTGKTTLTWDTHHCVIIQTQDAAGLTTQARYDYRFLTPVQLTDINDNQHIVTLDALGRVTTSRFWGTEAGQATGYSNQPFTPPDSVDKALALTGVLPVAQCLVYAVDSWMPLLSLSQLSQSPEEAEALWAQLRAAHMVTEDGKVCALGGKRGIGQQNLTIQLISLLASIPRLPPHVLGITTDRYDNDPQQQHQQTVSFSDGFGRLLQSSVRHEPGDAWQRKEDGGLVVDANGALVSAATDTRWAVSGRTEYDDKGQPVRTYQPYFLNNWRYVSDDSARDDLFADTHLYDPLGREYKVITAKKYLREKQYTPWFIVSEDENDTASRTPZ

SEQ ID NO: 3624 - protein, 531 aa, Photorhabdus luminescens
MSKYKLNRYLLASSILCFFTSGNVIAANPKISAYYLSGPAAQVDTQEYYASLDNFKKLSRDISKNKSNFNTLVLSFVQPGFVNYEKNSLKCSGLFGYTCTSGQSISIKEAENARADFMALKGVIADLKSHGVSTYIAVGGWNFSCDPKIYDITASKKDACGNEPGAVYDIFPNPLTKIPRFDSTITGKAADKAYRNIVNLAANLGVEGIDVDYEEFWHADINAKSWKLTPDSIKVPLNNSETLITSTLIAKGLGGYVYDASMKIVPGAEKIPRAMPATVDKFAAILKSFYTSINAVKPSLKLSIAGPATGGIPNMSANWGTNARNSDIYGGAWWGGNLYGLIYNTALSYPSLINRLSYIGVMTYDLSEKDCGFIGGGETYIPCDLPGQVKYYYGQYINWLKSGNEVVTFHIKLKGARNYAQASVQPQKLLVLPPITVGFEVGRPATGNLPLTKSALNSILDGTIKYGKTGLIMWDLFKNERYDGSNWKDEWATPNDLLSTACKKIGLTGEHYNCDSSVPTPDPVPAFIKKZ

SEQ ID NO: 3625 - protein, 223 aa, Photorhabdus luminescens
MENYVRPVLTLPDNAERLLLHSCCAPCSGEVMEALRASGIDYTVFFYNPNIHPKREYLIRKEENIRFAEQHNVPFVDADYDSDNWFERAKGMELEPERGVRCTMCFDMRFERTALYAYENNFSIISSSLGISRWKNMQQINDCGKRAASQYPGIQYWDYNWRKQGGSARMIEISKQERFYQQEYCGCIYSLRDTNKHRKSQGRDIIRIGVKYYGDEDTEGACZ

SEQ ID NO: 3626 - protein, 214 aa, Photorhabdus luminescens
LLCITAAEDTMNSYYDYIRIASMVSMVLIMPGPTNTLLVSSGYSHGFISTLRLILAEALGYITAISLWGLFLSTVSHVFVWSLVILKMCASTYIAYLAFKVWHFSLDKNVAKIHFITVLFATLLNPKAFVFATYIFPLTAFTLWSEYIPCMTVFVCALLPISLIWVGVGKILYVGKLGKGILKPDLFYRFASLVLCVFSVSMFYTSMKGVLYLZ

SEQ ID NO: 3627 - protein, 402 aa, Photorhabdus luminescens
METTMRHTISLRDLSFPAITAGFVAVLVGYTSSAAIIFQAAEAAGATTLQIGGWLSMLGLGMGISSLGLSLYYRTPVLTAWSTPGAALLATTLPGTSINEAIGIFIFASALILLCGITGLFARLMNYIPQALSAAMLAGILLRFGLDAFSSFSVNFVLTAGMCLTYLLARRYLSRYAIILTLLSGLIIAALQGGIHFEQQSTVAFVAPEFIAPSFTLSSLLSVGIPFFIVTMASQNAPGVATLKAAGYPVSVSSLISWTALISLILSPFGGFSVCIAAITAAICMSPEIHTDPNRRYMAAAVAGVFYLIAGLFGGSISMLFSALPAALIHIIAGLALLGTISGSLLQTLQNEKQRDAAVITFLITASGVTLLGVGAAFWGLIGGVITMLLLSLPEKNRIVHZ

SEQ ID NO: 3628 - protein, 381 aa, Photorhabdus luminescens
NYTFQHFMILIINKTYDSLPGLLRFKYYDRTYLTTLNLLTRKTELSIMKFFDMKFSDISKLAVISSCLAIPYSYADDRPILSLSVSQSGGNQTTADGSLSRKPNKQESRILPIWGDEARAKGYDLPEPFGASYGYMNMRQNIIVDDIKIIIPNTPGFEDVLDIQTGKTREKNESHMLKLDAWVLPFLNVYGVYGWTKGSSKTNIEGIRFSGFPIPDMKDIPFKLDFKGKTYGGGFTLAGGYDQFFGTLDTNYTYTNLDILDGKISALVVTPRVGYEFIFQPIIPGQGNTKLQVWTGGMYQKITQKFEGNISNLDLPPMFDKLVSAFDDYESMKFKVKQHVASRWNNTVGARLEVTRNFNLLTEVGFNKRNSCYISGEFRFZ

SEQ ID NO: 3629 - protein, 392 aa, Photorhabdus luminescens
LLYFGRVSLLMNIRCTLYGLALVSLFISDFSYGEARLSRGKIDGWLEKLGGSNTYDSSKAIDWGILPGPFYTPELGAGLGVAVIGLYRPDNNDHTSQISSLSLNGFASSTGAFGFTFDNYNFFADDQWRFFLSGTLNNVPTYYWGTGYQAGKTDDRKEKYHSQELHLQPRVLYRVADSTYLGAGWNFSSLHAKDPDNGAKKLFAAENDGRSILSSGVSAYFSYDTRDFLPNAHQGHVLDITYTHFSPALGSDRRFNTVDMQYSTYYQLDEKSVLAFDSYGRFTDGQVPWNMLSMLGNSHRMRGYYEGRYRDKNVISTQLEYRHKLDWRHGFVLWAGAGTLSHYAKDIGSENWLPTVGAGYRFEFKPKMNVRLDFGIGKKSNGFYFQVGEAFZ

SEQ ID NO: 3630 - protein, 387 aa, Photorhabdus luminescens
KKQWILFSGRRGVLKLRLWITALTLVAGCQGTFSSIAPVQPDLNSETTAEATRAWPVLAPIPSPEGLRACCAFGYNLKTELLTIPVPFYHISNVLDADNLGAHNYNNSFFGTVASLTGLSNEKVGMIYTRRGGFIDISHVRDTADNAVFLFSQIWPRLGEEWQIELSSELALRRIQFYQFTPPASIEQRYTLTAYLAAKLAFELAAWHEIAQWYGYQSVPGFSEKVSAFSPEDLYSNLLGARLSLSLILAGQVPSMKQYRLSMQAILPPALRELEALSPDETRKMFEQVDGIWWDSKRRVPDKRLILQRDFHTHSDRTPNMVPTEQQVPLRLTLPQQYTGYRLSELAELQLWPSRQMKDLPVPESYWIALDFPQLAEKAKEQQENHZ

SEQ ID NO: 3631 - protein, 206 aa, Photorhabdus luminescens
SQLRCPYSWRGKMNKLALSTTAALIFATGSAVAANDAAGGTLHFSGAVTDATCTINGGASANLSIILEPISVTQAGQKEGLIDFGKKAFSLEFSNCQSKAVGFDPATSMLKIQFSSSHTISNDAKYLVNQELNANGKPKNVGIAIVKHAEENNPIMLNKAFDTGIKGSETIPEVVDFYAKYYKVGAGDADHGKIVTMVTYHVTYLZ

SEQ ID NO: 3632 - protein, 233 aa, Photorhabdus luminescens
MKKLFLTILLGITTLSAHANIVINTTRVIYPASNKEVSVQLLNAGDQPSLVQSWIDDGDPNSTPETAKVPFLLTPPVVKIDGNNGQQLRIKYISNNLPTDRESLFYLNVLDIPPVAENISDKNVMQIAIRTRIKFFYRPDKLSILPKQIQQHIVLKREGSQLKLENASPYFMSIVGLKSSDTQPNLLNEGTIIKPFSSHSFSTNEKVKVGDKLTLAIVDDFGAINKLTLPLQZ

SEQ ID NO: 3633 - protein, 825 aa, Photorhabdus luminescens
MIRQKISPLALIISTLLYTDCLCYATTFNTDFLVGESAKADLSRFYSTSELPAGRYGIDIYLNNDWKGRFDINIQNDGKDIYLLNEDLPRLGIKIDKNQLPESNLSKDEILLTKIIHEGTANLDVPKLSLHLVVPQAYIKNELKGYIDPAFWDRGIPGAMLSYNANYYHTQNRNKQNRDREDEDNAYVSLNSGLNLFGWQLRDQSSYHYTRSNGDKWSNNTRYLQRGISSINSEFRIGDSYTSSDLFDSFRFRGINLKTDMRMYPDAWQGFSPIVRGVAQTNALVKITQNNVVIYQGNVPPGPFAIDTILPTGSGSDLLVAVTEADGRTNSFTVPFSSVPNMMKEGLGKYDISAGKTHIANSRYKPNFFQASYQYGFNNVLTGYTGTIISKDYYSLLLGSGFNLPIGAVSIDVSQSSAKFDNSPTMKGQSYKLAYSRYIPQTKTNFSLAAYRYSTKNYLTLIDAIDLHDWISNGYNQQYYSHQKNTFNINLNQNLGSRAGSLFLSGTFRNYWGTQNKSREYQMGYSNSLGKINYSLTASRVRYNINETESKEEQRYYLMLSVPFELFGYPAYLTNNVSINESHYDNSNLGLSGSAGPNNRLNYHFNISDQKSGSTTTSANLTYKTSVSTLSSSYSQSKEYRQMGLGATGSLVAYRGGILAANQIGETFAIIDAPGTANASVNGDKSMVTNTSGKLLIPYLSPYRKNAIMLDTSEVPEGAAELIGNIRDVAPYSGAITHIGFKTDQRKTFIFYSAQADGKPLPFGTEIVDSEGNSLGYVGQGSMVFLRVEKLPPQIYVHIGQLGEKSCIINDPQPEMSSNANICRZ

SEQ ID NO: 3634 - protein, 378 aa, Photorhabdus luminescens
NELKRQYLPLREKIMKLKPSYLKPLYLAAIISLSSGIAYADCQPKYAIPAPAILVDMTDHLTLNSNATWILNTQYSGYFTCTRNSLWKQNSVANGSPFTKNKVVLGFNGGKNYAEVTITNLSPGNSINLGNSNDTYPASKLQAQFTLNVKLLSGRPGGSNIHVFSGNSATLKTAVIAMDTTNLGLLDAILRFATDFLTFILTWEWPTHSEDIYYQPVTMIFNHRDTTCHFLNAGLTVNLPKVNRIRLLNGADKGETPFTLNFECKYLQNGKTSRSVKAYLSSNNLLPNDNRTLIDSKAGAAKGVGIRVSQTSDSTPITFSASQSSSQGATLLFSKNSGNVIDKHFTIDLNAYYHVYDPQNIIAGELKATSVLNFEYNZ

SEQ ID NO: 3635 - protein, 264 aa, Photorhabdus luminescens
MPSQTTMRTTAIFAFFISLLFSAFSHASTSTAKSIEYSHNDMQSNLPDLRKYPSGTLRKKAFLNVVVPVIDQHNQQIMQERKWLLEHQNDKLWSIQGIKRLQQICKNYNVSCSSSPKKINWNKLLSRVDIIPTHFVATQAATESGWGTSKLAQQNNNLFGMRCGNNCKKTQGKIKGYSAYPTINDSVKAYMRNMNTHNAYESLRASRAKQRSLQESLNTSKLIDNLEGYSQLGSTYNNYLHKVFNSNKGLITQAQKLAKNDHDZ

SEQ ID NO: 3636 - protein, 474 aa, Photorhabdus luminescens
MNFFSFEFLGSFVAFFLLYWMLQKHAKTQNYLLIIASYLFVFSFNPLFTSILFGYTLFIYLLTNVASKFLSNRITFTILTIGILGCFTLFKYYSFFQESLQQAFAKFGLSIDLPVLTLLVPLGLSFYAFHSVSYVVAVARKEIPKASFPDVALYLCFFPSIVAGPINRAKDFLPQIQISSRVIIEPSRAILLITLAITKLFLFSSYLSENYVNPVFDDPVSYNAGQILVSIYAYAWHIYFNFSGYTNLVTGLALLLGFRVPENFNAPYLAENLQAFWHRWHISLSEFIRDYVYIPLGGNKKGFLRKNLNLFVAMVISGLWHGAGINFIIWGAIHGLGLIILNVKYQLFPPIDKKNQNIPQNPVISFLSRIITFHFICLAWVFFRCPTLDDALILLNQLISSNLFHSIIANSGLLLMFWGLFIIYPWLINLKIMVEKMYSQISWICYPIPLAIILTLVFMISPQGIPGFIYANFZ

SEQ ID NO: 3637 - protein, 555 aa, Photorhabdus luminescens
MKSSIVLLIVFCSAVSGSQAADIADQQLIHQQARQQALETQLAPPPAEVHLSVPETGESSAFAVETPCFPITHVRLAGTENFPHWLPFRLVAQQGENHCLGDKGISRLITQLQDQLINHGYVTSRVLVPRQDLRTQTLKLVMIPGKIRHIRYTPDSGNYIQRITPFPAREGKLLDLRDIEQGLENLQRFPTVQADMNIVPAEQPGESDIVLDWRQSRHWRVATYLDDTGSKSTGRYQGGLTFFLDNPLALSDLFYLSGGRDIHSSAGKGSQNDTLYYSLPFGYWMASVTASHYDYTQTIAGLNQAIQYRGKSQNLAVQLSRVLHRNADQKTLLNGEIYRRASRNFIDNTEIDVQRRETAGWKLGLSHHHFIGSATLDTRVTYQQGMRWFGAQPAPEEYRNEGTALPKITQFSATLAGPLTLFSQPFFYQTQYLRQISASPLTPQDRFSIGGRWTVRGFDGELTLSADRGWYSRNELDWQTPLRGQSLYLAMDYGEVGGRGSDTLLGKHLAGSALGWRGSLKGVSYDLFVGVPLSKPAGFQTSPVTAGFNLYWQYZ

SEQ ID NO: 3638 - protein, 437 aa, Photorhabdus luminescens
MKFPGKRKSKHYFPVSLRDPLLQPIKEMMDGENNRAYIVGIDQTLVDIEAKVDEDFIQRYNLSQGHSLVIEDDVAETLYKELTDNNLISHEFAGGTIGNTLHNYSVLADDRSVLLGTMCSNIQIGSYAYRYLCNTSSRTDLNYLQGVNGAIGRCFTLVTENGERTFAISPGQMNQLKPESIPEKIIAEASALVLTAYLIRCKPGEPMPEATMKAIEYAKKHSVPVVLTLGTKYVIADDPQWWRDFLVENISVLAMNEDEAYELTGFSDPLLASDVALDWVDLVLCTAGPAGLYMAGYTEKDYMRQTTHPLLPGAIAEFNRYEFSRAMRKSDCQIPMKVYSHIEPYMGGPEKIMNTNGAGDGALSALLHDITANNHHRMNVPNSSKHMRTYLTYSSLAQVCKYANRVSYQVLSQHSPRLSRGLPEKEDSLEESYWERZ

SEQ ID NO: 3639 - protein, 389 aa, Photorhabdus luminescens
FHHKEYQDSFMPISEFKSNLKTAGQVIFIVILTSLLLIWLNHRSLDRFWQQEYHRQSLWATLQGHPLWDFGDNLEQGVLAAGEAFLSHTTSNNSNNHQETLQKTDITLPADFQIGLKLLSGYPSPVTNLPATFPELLQKSPHTHPVNSPIPHDLRNNVSPSTVIAKTNVTLTAKDKVLFAGDSMMQGIAPHLKRRLYQDYSISSINLSKQSTGLAYPSFFNWPETINKTLEANHDIKLVVIFLGPNDPWDMPPKHGNIYLKFASPDWENLYRQRIEMVLTEARNHGADIIWVAPPNMRQKKLSANMKYLRSLYQSEVTKAGEIYVSVNDIFKYHANDYSDYVGDNSNKIKLRSGDGIHFSLKGQQTISDNIFSLIKFIQEPAKQNENSZ

SEQ ID NO: 3640 - protein, 417 aa, Photorhabdus luminescens
LNLFRNPLNKMKIVKQLRRRYQAASISLVITLSLSLISCHKQKPGPLPTQQSAKEGQQLIDFGEPNLALLADKLHNSRHNQLHFVQIGDSHTAADFFTGKLRSLLQQRFGNAGIGFVSPINVPGQRNAMVSMTDNKQQWKLTTSRKDNRPDFPIGGTIAEPNSQISQLILRLFAPSHDRYQLKTLYQASDDAQILVQSATKRILKLPATHDHWQFSTEESVTFPVNIMAIQNNQLKLGGWFINRKQPGVMLSALGINGATINMMDKWQPEWIDTLVQMHPDMMILAYGTNEAFNHSLDLPSYRQQLETKIKQIRNQLPQTVILIIGPGDSLKNNQFTSCIAQQSTMLDNIIHIQQKVAQDQHTLFWNWRAYMGGKCSIRRWAQQDLARPDYVHLSAAGYERSAEALYQQLIDALGQZ

SEQ ID NO: 3641 - protein, 308 aa, Photorhabdus luminescens
NMIFPKKYPLSTIKRLISGWKECSFERYQQAYSLYGGGISTHPDIVRFLNEKFGNSFIFYVKENPQIENVIEGAYFTCKDHHLAASHQKDYYFFSYDEILFPIAKHLKTIIPRKSKTISPLHKENFVNIYYGRLNKRTICLAKEDFSYKTRRNRSNEINKFKRAGGEIHQIDDFTCQEFVDIYTTLYEKRWGKKHSEEEKGKLTELYTELKQHLYGCVLTINGTPAAYDLVIKSDSPQWVSFDAVNGGYDPEYANLSLGSIVMWLNIQNASTLCQQNQKTMRYSIGKPTFAYKDRWCHRHQLARTLFZ

SEQ ID NO: 3642 - protein, 446 aa, Photorhabdus luminescens
MSTLTLVLTAVGSVLLLLFLVMKARIHAFVALILVSMGAGVFSGMPLDKIAETMQEGMGGTLGFLAIVVALGAMFGKVLHETGALDQIAVKLLNSFGEKNAHYSLGIAGLVCALPLFFDVAIVLLIGVAFAVARRTGGNVVKLVIPLFAGVAAAAAFLLPGPAPMLLASQMNADFGWMILIGISAAIPGMLLAGPIFGNFISKYVTLDLPVDISEPSLGQGKMPSFGLSLSLVLFPLALVGLKAIGENFVEQSSELYQWLEFIGHPFSAILVACLIAIYGLAIRRGMSKEKVMDICSSAIQPAGIILLVTGAGGVFKQVLVDSGVGPALGNALIGAGLPIALACFILAGTVRVIQGSATVACLTTVGLILPVVDLLGYSGAQLAALSICIAGGSLVLSHVNDSGFWLFGKFTGATESQTLKTWSIMETILGTIGAIVGMVFFAMLZ

SEQ ID NO: 3643 - protein, 332 aa, Photorhabdus luminescens
MKKKRPILQDVADRVGITKMTVSRFLRNPDQVSEQLRKKIADALDELGYIPNKVPDILSNSTSHAIGILLPSLTNQVFAEVIRGIEYVTDSYGYQTMLAHYGYRSEKEEERLISLLSYNIDGLILSERTHTPRTLKMLGTAGIPVVELMDCVSPCFDMAVGIDNFEAARQMVIAMIERGCQRVIYLGARQDERTIIRLEGYEAAMKSAGLKPGKIMTPDSSSYTLGGQLLNEARTKYPDVDGLFCTNDDLAIGAIFECQRQGIAVPHDIAIAGFHGHDVGQVMTPKLASVLTSRDLLGRRAAELLMARLKGEHLPQKIIDIGFQLSLGESIZ

SEQ ID NO: 3644 - protein, 464 aa, Photorhabdus luminescens
MVKTARNMAGLPWIAAIAFFMQALDATILNTALPAIAESLKHSPLAMQSAVVSYTLTVALLIPVSGWLADRFGTRRIFMFAVSLFSLGSLACALSGNLAFLVVSRVIQGIGGAMMMPVARLALLRAYPRSELLPVMNFVTIPGLVGPILGPMLGGLLVTYATWHWIFIINIPIGLLGIIYAKKHMPNFTMPKRSFDFFGFILFGLSLIMVSVSLDLLGESSLPGYIPLTIMVGGFMILFGYLMHARKQPQPLISLELFRIRTFSIGIIGNIVTRLGTGCIPFLMPLMLQVGFGYSAVIAGMMMAPTAIGSVIAKSFVTNVLTGFGYRKTLVSITIIIGLMISQFSLQSPEMSAVLLSIPLFLLGMAVSIQFTSMNTITLADLTDNNASSGNSLLAVTQQLSISFGVAVSAAILRFYESMPNGTTVDNFHSTFITVGIITLLSSSTFLLLHKEDGDNMIKKKNTZ

SEQ ID NO: 3645 - protein, 334 aa, Photorhabdus luminescens
VATMKDVARFAGVSTSTVSHVINNNRYVSDGVKKKVNDAIEQLNYAPSALARSLKIKQTKTIGMLVTTSNNPFYAEIVRGVERSCYERGYSLILCNTEGDTKRMDYSMETLLQKRVDGVLIMCTENQHNSCDVLRRYPPLPVVMMDWSPFDIVGDVIQDNSLLGGEMATNHLISCGFKKIACIAGPQDKTPANHRLKGYRKAMANAGLTIPDGYEIYSDFEFAGGFKSMQELLQHPEPPEAVFAGNDAMAVGAYQALYQAGLSVPDDISIIGYDDIDLAPYMIPPLTTIHQPKDELGKLAVDTLLYRMDNPESDPKLLVLTPTLIERSSVSRSZ

SEQ ID NO: 3646 - protein, 310 aa, Photorhabdus luminescens
MSTAKLAVLGSINADHILNLKSFPRPGETVIGEQYQVAFGGKGANQAVAAGRSGADITFIACVGEDDIGFRICQQLAKDNINTSGIEVIKGETTGVALIFVNHQGENIIGINAGANAALTPEYFYRYQNIIEEADALLIQLESPLETVQLAATIAKQNNTKVILNPAPARKLSDQLLSLVDIITPNETEAEYLTGIKVENDSDAENAAQILHGKGIETVIITLGSRGVWLSESGQKGKIVPGFKVNVVDTVAAGDTFNGALVTALLERKSMLSAIRFAHSAAAIAVTRQGAQPSVPWRNEIDAFLIEQDZ

SEQ ID NO: 3647 - protein, 297 aa, Photorhabdus luminescens
MKVKKLVTILSAVALSMTVSVNALAKDTIALVISTLNNPFFVTMKDSAQKEADKLGYNLIVLDSQDNPAKELANVQDLTVRGTKLMLINPTDSDAVGNAIIMANNAKIPVITLDRIANKGTVVSHIASDNRLGGKIAGDFIAEKLGNEAKIIQLEGIAGTSAARERGEGFNKVAQEHKFNVLASQPADFDRTKGLNVMQNLLTAHPAVQAVFAQNDEMALGALRALQTAGKSDVLVVGFDGTGDGIKAVQRGKLGATIAQRPDQIGIVGVQTANKVLRGEKVEAVIPVELELVIKKZ

SEQ ID NO: 3648 - protein, 324 aa, Photorhabdus luminescens
MNSNISPTFKRWFTKEWLLKQKSLIALLVLIAVVSSLSQNFFTLNNLFNILQQTSVNAIMAVGMTLVILTSGIDLSVGSLLALTGAIVASLVGTEVNALVAIVSALALGAAIGACTGIIIAKGKVQAFIATLVMMLLLRGITRVYTDGSPINTGFSDNADLFGWFGIGRPLGIPTPVWLMLIVFVITWYILHHTRLGRYIYALGGNESATRLSGINIDKIKIIVYSLCGFLTALASIIEVARLSSAQPMAGGGYELDAIAAVVLGGTRLAGGKGLIIGTLIGALILGFLNNGLNLLGISSNYQMIVKAIVILLAVLVDNKSGKZ

SEQ ID NO: 3649 - protein, 368 aa, Photorhabdus luminescens
MSNKPIKGTNFSEEYFNYYNSKQDDEIDLFELFSVLFQSKLLIITVTILFAVIGFVAASLMPQKWSSSASIVKPQLEEIQPLKDILTKLEVLNLQPSVTSSSLYNNFLNNFNSRVLREEYLVNTEYFKNLVAESGDHSPLVKRKLIEKIVNDNISSSSKAEKDDENGETKLTFSAGTAEDAYNLLNGYIDYVSSVVHEQVKSELSDMVKQKLNYSEGLYSVDLNRVNNIQEANVERLKHALSIANSAGIKKPISSEGAMIKDDPDYSIALGADALQRKLQITEEIKDPTLIDADLRNRLFYIKELKALKVDKVNFQPFRYMQAPYEPTAKDSPKRLLILIGSAFLGLILAVVSVLIRHMVRSRQQAAZ

SEQ ID NO: 3650 - protein, 502 aa, Photorhabdus luminescens
MQPVLELKGISKSFPGVKALSGAALRVYPGKVMALVGENGAGKSTMMKVLTGIYTRDTGTVHYLGKEVIFSGPRSSQEAGIGIIHQELNLIPQLTIAENIFLGREFVNKFGAIDWRKMYQEADRLLKKLNLSYSSHRLVAELSIGDQQMVEIAKVLSFKSKVIIMDEPTDALTDTETESLFRVIYELKSQRCGIVYISHRLREIFEICDDVTVFRDGQFIGEKSVKELKEETLIEMMVGRKLEDQYPRLNLPRGKKRLEVKQISGPGVTNASFSLYSGEILGISGLMGAGRTELMKIIYGALPKTQGQITLDGTPIVIRNPQDGLACGIVYISEDRKRDGLVLGMSIKDNMSLTALRYFSNRLGGLNHKEEQNAVSDFIKLFSIKTPSMGQVIGLLSGGNQQKVAIARGLMTRPKVLILDEPTRGVDVGAKKEIYQLINQFKKEGLSIILVSSEMPEVIGMSDRILVMCEGQISGEFFAEQATQEILMAAAVGKQYGAIQEZ

SEQ ID NO: 3651 - protein, 504 aa, Photorhabdus luminescens
LVRIMLLAEKIVCLSHYLESGLYERQQTIRLCLLAALCGESVFLLGPPGIAKSLIARRLKFAFRDARAFEYLMTRFSTPEEIFGPLSIQALKEEGRYQRLTNGYLPETEIVFLDEIWKAGPAILNTLLTAINERKFRNGDTEDKIPMRLLITASNELPEADNSLEALYDRMLIRIWLDKIQEKKNFRALLSSHKNENDNPVPANIQITSEEFHQWQKEIDKIVLPDSCFDIIYHLRQQLDATEHSPYVSDRRWKKAIHLLQASAFFNGRKEISPLDLILLKDCLWHDLHSFKLLPQYLNTLMTEQAYRQRILSQQIDSLYHQWTQACQDKNDQQALKLEKQTRLFGRKIQYSLPDHINEEKLILFLHTPLHLHDIKVNFIELEKKALNIWINKGRELSARLNGIGFPQNIAAEVNSAHQPEIFDISRRSSTLYLPDHQHQQNEENNEWQERLEKFNQEIHHQHQLFNQHQPCLFIESHWLATIEQSFIQLSDKIKQLKIKIGSZ

SEQ ID NO: 3652 - protein, 486 aa, Photorhabdus luminescens
MISLTTLDLLLSINEGEMIEEIILTLLASPQLAIFFEKHPRLKRALLKDIPGWKHDLQQRIKEALIPVTLAEEFQLYQQILSANTNYFYLKLPDILETLNRIESPFSEEAQKLATNTIADSNTLQTLFIQRWRISLILQTTTFHKQLLEQEKEQLLAELQQKLTLSGNLDPVFSENDRAAGRLWDMSKSQLNHSQNDKQLLIHYSEFLHQQPELKKLAQLLGRSQSVKSKPQENHFFEPVTTIERTPDIIPEQVNGIGQSDDILRLLPIELAILGIEDLEYEFYRKLVEKKLLTYRLQGDNWREKTTLQPVTHYSQEEKPQGPFIICVDTSGSMGKFNEKCAKAFCLALLRIALADNRNCHIMLFTTGIVHYELSSPDGLEQATRFLSQTFKGGTDLAFCLTSTIEKMKEKCWKNADAVVISDFIAQRLPNSLIHQIKNLQLHQQYRFHAVSMSQYGKPDIMRIFDHIWHFDTGLKSRLLRKWRHZ

SEQ ID NO: 3653 - protein, 331 aa, Photorhabdus luminescens
MKKSFIEKQQQISFVKSFFSRLLESKLGLIEVQGPILSCLGDGIQDNLSGHEKAVQVKVKTLPDSTFEVVHSLAKWKRRTLGRFGFQPEQGLYTHMKALRPDEDRLTPIHSVYVDQWDWEKVMEDGQRSLAYLKQTVGKIYEAIKETEKAVNKEFGLAPFLPDQIHFVHSETLLSRYPDLDAKGRERAIAKELGAVFLIGIGAKLSDGQSHDVRAPDYDDWTTPNSDGFVGLNGDIIVWNPVLEDAFEISSMGIRVDAEALERQLALTSDEERLQYDWHQALLKGDMPQSIGGGIGQSRLVMLLLQMKHIGQVQCSIWSPEVRETVEDMLZ

SEQ ID NO: 3654 - protein, 630 aa, Photorhabdus luminescens
  misc_feature (152)..(152): Xaa can be any naturally occurring amino acid
MFYPEQFDVIIIGGGHAGTEAAMAAARMGRQTLLLTHNIDTLGQMSCNPAIGGIGKGHLVKEIDALGGLMAKATDQAGIQFRTLNASKGPAVRATRAQADRVLYRQAVRMALENQPNLMIFQQPVEDLIVENDTVTGAVTRMGLKFRAKAVXLTVGTFLDGKIHIGLENYSGGRAGGPPAISLAQRLRELPLRVNRLKTGTPPRIDARTIDFSQLTQQLGDNPTPVFSFLGNVKQHPQQIPCYITHTNEKTHDVIRNNLDRSPMYTGIIEGIGPRYCPSIEDKVMRFADRDAHQIFLEPEGLTSNEIYPNGISTSLPFDVQMQIVHSMKGMENARIIRPGYAIEYDFFDPRDLKQTLESKFIHGLFFAGQINGTTGYEEAAAQGLLAGLNAARYASEEESWFPRRDQAYIGVLVDDLCTLGTKEPYRMFTSRAEYRLMLREDNADLRLTEKGRELGLVDDSRWEHYCRKLEMVEQERQRLRNIWIHPNSNNLNDINNILKMPLSKEANGEDLLRRPEMNYKLLTSLPLFSPSLEEPQAADQVEIQVKYEGYIARQQEEIEKQLRNENTSLPVDLDYRQISGLSNEVVAKLNDHKPSSIGQASRISGVTPAAISILLVWLKKQGLLRRSSZ

SEQ ID NO: 3655 - protein, 207 aa, Photorhabdus luminescens
MLNKLELLLTKAGIELSLQQKQQLVAYVDMLNKWNKAYNLTSVREPEQMLVRHIMDSIVVSPYLQGHRFIDVGTGPGLPGIPLAIVRPDSHFTLLDSLGKRVRFLRQVQHELDLVNIEPVQSRVEAYSSEPPFDGVISRAFASLKDMVSWCSHLPEPIHGRFYALKGVLPEEELTILPFGISIDSVIKLNVPELEGQRHLVILKSNZ

SEQ ID NO: 3656 - protein, 275 aa, Photorhabdus luminescens
MSASGEVSTARDYIGHHLNNLQLDLRTFELVDPNSGGSATFWTLNIDSLFFSVVLGILFLYVFRKVAVNATSGVPGKLQTAIELIMGFVDNSVRDMYHGKSKVIAPLALTVFVWVLLMNVMDLLPIDFLPYIGEHFFGLPALRVVPTADVSVTLSMAIGVFVLILYYSIKMKGIGGFTKELTLQPFNHPLFIPINLILEGVSLLSKPVSLGLRLFGNMYAGELIFILIAGLLPWWSQWLLSLPWAIFHILIITLQAFIFMVLTIVYLSMASEEHZ

SEQ ID NO: 3657 - protein, 514 aa, Photorhabdus luminescens
MQLNSTEISELIKQRIAQFNVVSEAHNEGTIVSVNDGIIRIHGLAEVMQGEMIALPGNRYAIALNLERDSVGAVVMGPYADLAEGMKVKCTGRILEVPVGRGLLGRVVNTLGEPIDGKGPVEHDGFSAVEMIAPGVIDRQSVDQPVQTGYKSVDAMIPIGRGQRELVIGDRQTGKTALAIDAIINQRDSGIKCVYVAVGQKASTIANVVRKLEEHGALANTIVVVATASESAALQYLAPYSGCAMGEYFRDRGEDALIVYDDLSKQAVAYRQISLLLRRPPGREAFPGDVFYLHSRLLERAARVNAEYVEKFTNGEVKGKTGSLTALPIIETQAGDVSAFVPTNVISITDGQIFLESSLFNAGIRPAVNPGISVSRVGGAAQTKIVKKLSGGIRTALAQYRELAAFSQFASDLDDATRKQLDHGQKVTELLKQKQYAPMSVAQQSLSLFSAERGYLEDIEIAKVIDFESALLAYANREHADLLKEIDQSGGYNEEIEAKLKALLDSFKATQSWZ

SEQ ID NO: 3658 - protein, 288 aa, Photorhabdus luminescens
MAGAKEIRTKIASVQNTQKITKAMEMVAASKMRKTQDRMAASRPYAETIRSVIGHLALGNLEYKHPYLEERETKRVGYLVVSTDRGLCGGLNTNLFKKLLSEMKDWSDKDVQCELALIGSKATSFFASVGGNVVAQVTGMGDNPSLSELIGPVNIMLRAYDEGRLDKLYVVTNKFINTMSQEPTITQLLPLPAGDDETLKKKSWDYLYEPDPKALLDILLRRYVESQVYQGVVENLASEQAARMVAMKAATDNGGSLIKELQLVYNKARQASITQELTEIVSGASAVZ

SEQ ID NO: 3659 - protein, 461 aa, Photorhabdus luminescens
MATGKIIQVIGAVVDVEFPQDTVPKVYDALEVQNGEAKLVLEVQQQLGGGVVRCIAMGTSDGLSRGLSVTDLGHPIEVPVGKATLGRIMNVLGEPIDMKGDIGEEERWAIHRPAPSYEELSNSQELLETGIKVMDLICPFAKGGKVGLFGGAGVGKTVNMMELIRNIAIEHSGYSVFAGVGERTREGNDFYHEMTDSNVLDKVSLVYGQMNEPPGNRLRVALTGLTMAEKFRDEGRDVLLFVDNIYRYTLAGTEVSALLGRMPSAVGYQPTLAEEMGVLQERITSTKTGSITSVQAVYVPADDLTDPSPATTFAHLDATVVLSRQIASLGIYPAVDPLDSTSRQLDPLVVGQEHYNVARGVQSILQRYQELKDIIAILGMDELSEDDKLVVARARKIQRFLSQPFFVAEVFTGSPGKFVSLKDTIRGFKGILDGDYDHLPEQAFYMVGTIEEAVEKAKKLZ

SEQ ID NO: 3660 - protein, 326 aa, Photorhabdus luminescens
MNNGKFGVLLVNLGTPDKPTTAAIRRYLAEFLSDKRVIDLSRFIWKPILYGFVLPFRSSRVAKLYQKIWTDEGSPLLVYGRRQQKLLAERLAGIPVELGMNYGSPSLEQAIDNLLKQNVEQLIVLPLYPQYSGSSSAAVFDGVSLVLQKYRTIPGMHFIRSYADHPAYISALKETIEQSFDKHGQPDRLLLSYHGIPQRFVDTGDIYAEQCKLTTRLLKQAINYPTEQVMMAYQSRFGREQWLTPYVDQTMKTLPNQGIKHIQVLCPGFSSDCLETLEEIKQLNKEMFLNAGGEKFEYIPALNDNASHILLLEELVNGFVRNRDEZ

SEQ ID NO: 3661 - protein, 458 aa, Photorhabdus luminescens
MSNSAKSVVILAAGKGTRMYSDLPKVLHLLAGKPMVQHVIDTAMALGAKNVHLVYGHGGDLIEQTLSDQTLNWVLQAEQLGTGHAMQQAAPHFAGDEDILILYGDVPLIGADTLERLLAVKPEGGIGLLTAILDNPTGYGRIVRENGEVTGIIEQKDATEEQRKINEINTGILVANGSDLKRWLSQLDNNNVQGEYYLTDVIALAYKEGRKIEAVHPTRLSEMEGVNNRLQLSALERIYQSEQAEQLLLAGVMLLDPARFDLRGTLIHGRDVVIDTNVIIEGNVTLGNNVQIGTGCVLKNCIIGDDSIISPYTIVEDSEMETGCTVGPFARLRPGSKLAEKAHVGNFVEMKKSYLGKGSKAGHLTYLGDADIGRDVNIGAGTITCNYDGANKFKTIIGDNVFVGSDTQLVAPVIVAKGATIGAGTTVTKNIAENELVVSRTKQTHIQGWKRPVKEKKZ

SEQ ID NO: 3662 - protein, 610 aa, Photorhabdus luminescens
MCGIVGAVAQRDIAEILIEGLRRLEYRGYDSAGLAVVDNEKNMFRLREVGKVQVLADEVDKQPVLGGTGIAHTRWATHGEPNEKNAHPHVSDYIAVVHNGIIENYEELRVQLIALGYQFISDTDTEVIAHLVHWEQKQGGTLLEAIQRVIPRLRGAYGAVIMDSRDPGTIIAARSGSPLVIGLGVGENFLASDQLALLPVTRRFIFLEEGDIAEVTRRTVRIFNTQGKPVEREQIESNIQYDAGDKGIYRHYMQKEIYEQPMAIKSTLERRLSHGQVDLSELGPNAAKLLAKVEHIQIVACGTSYNAGMVSRYWFEALAGIPCDVEIASEFRYRKSARRSGSLLITLSQSGETADTLAALRLSKELGYLTSLTVCNVAGSSLVRESDFALMTKAGAEIGVASTKAFTTQLTVLLMLVAYLGRLKGVDAEQEQEIVHALHALPSRIEGMLSKDKIIEVLAEDFSDKHHALFLGRGDQYPIAVEGALKLKEISYIHAEAYAAGELKHGPLALIDADMPVIIVAPNNELLEKLKSNIEEVRARGGLLYVFADQDAGFTDSEGMKIIPLPHVEELIAPIFYTVPLQLLSYHVALIKGTDVDQPRNLAKSVTVEZ

SEQ ID NO: 3663 - protein, 373 aa, Photorhabdus luminescens
YQYETIIVEIITGWRAFKNLGLIETMNLAKNALPKDSTESFTSGNHNIKTGGNYSSLSLTKGDGRYVFIETTSHEEGSFCAIGHRESNSSNINVVHLPRKSGYIAIANEHYSKSESDSRFIQLNTDTKTSGYILVKTANYYDDPNSRHLGRSGFLRPNGIDNLGALAIHIAHPDVDSPQHARGLSFGYGGYSEAFSVSTYAFDESGNFRGKRKILTEDDILVGIPLPWSKPTAPAGYLICSGQQFDKSMYPKLGEAYPSGALPDLRGEFIRGWDNGRSIDSGREILSHQNSTKLPNLYTHAASENIGLLVSPPINHFSSNYPSEIMASDFEEAEFGSGQYFSTPLNPTGSVSLSTFRVRPRNIAFNYIVRAAZ

SEQ ID NO: 3664 - protein, 195 aa, Photorhabdus luminescens
LGNNGLATKAGWLIIYHAEPYSREFIGARPEYLMEGVGLPANSYPDAPQLPDSDDMAVCRSEDKSCWQIVPDYRGKIVYNTQTLAQYEITELGELPESLTFKQPVTDFDKWDGKQWVTDKYAIKDSQIKQADQQRVALLRQANETVTLLQHAVDIELVSEKEKLLLLDWKKYLVLLSRIDISSAPDINWPEKPEZ

SEQ ID NO: 3665 - protein, 358 aa, Photorhabdus luminescens
YQYETIIVEIITDWRVFKNLGLIETMNLAQGAVQNSRKVNGKVLTEDINITSQDIFNGQVVYLGDKANLDNYKIPGVYYQDYNLYAQNGANYPEPLAGSLVVLQAAGIIQRYFVYNSSRVYTRSQYHNLPWTPWAQEYNTLNRPTASDIQSEPRYTTTIDLTGLSTERYYPVWWSLPPNVGANSWLTLHRPYPYDAEKKPFGEGVTHVAGLLVQIEGGDVPWGGDARYLNIKRINQTYRKTVKAIHHAMISIARPIDGKYPLYGDVKSGDIVDCYVYSGCYLRGGLTYFTTSNFQSIHYSREEGEAEIHRWSSEDIKREMKWMVKSLAINDPLLGEEYTDNTVPYSLEYDARYQKKPZ

SEQ ID NO: 3666 - protein, 205 aa, Photorhabdus luminescens
MKKNITEIKMGADSGGKQAIERLVSAYGFKSRQALSDHLGVSKSTMANRYLRDSFPADWVIQCNLETNASLLWLSTGQGEMFPDREKKKESLKNIITPKIQRVKLVGGKLSDDDPVILDNQLIARKIKKPLIIDNNNTWYLLDTEEHDVQDGLWLIDIEGMHSIKKITKIPVSKIRVCDNDVTFDCAINEINFIGRVYLMISRYZ

SEQ ID NO: 3667 - protein, 281 aa, Photorhabdus luminescens
MDTQLTELLRLLRNLIRTGVVTEVDTNRGVCRIATGNLETDWRPWLTMRAGNSRTWWAPSRGEQVLLLSVGGELTTSFVLPAIYSNQFPEPSTFDHIDFPDSGLPAIYSNQSAAPSGRSEQAVHIVFPDGARMEYEPKFGALKVTGIKTAKVQASYSIDLEATNIKLKANNEIKLESYNEIKLESYNEIGLDAKNKIDLKALNKIGLDAKKELELKSHEVKCEAEEKIELKASELTLKGNTKLEGNVENTGGKLSSNGVTLHSHQHTGVMAGGATTGGPVZ

SEQ ID NO: 3668 - protein, 333 aa, Photorhabdus luminescens
MPTIDLSQLPPPDVVEPLDYESLLAERKAKLISLYPEEQRDAITRTLELESEPLVKLLEENAYRELILRQRVNEAARAVMLAYATNRDLDQLGANYNVTRAVMEPDSTFRDRIQRAFEGLSVAGPIGAYEYHALKVNESIHANRNEYKGEYQTVADVSVVSPSPANVTVTVLSRKWKWEKDKEDEEDKEHSGVASQELLDKVIAALNDENVRPVADRVKVQSANIVEYQIDAVLYLYPTPESEPIRKLAQQNMDKYVLDQHKLGRDIRLSAIYAALHVAGVQQVELRAPTKDIILCKDQAPYCTGAKLEIGKTQTDDCSKPNPGLIVGGSDEZ

SEQ ID NO: 3669 - protein, 206 aa, Photorhabdus luminescens
LMNDRLLPTGSTVLELAAAKACSQLQNIPVPLRQLWNPDICPEELLPYLAWAWSVDRWDENWPVSTKRDVIKNSLFLHKHKGTIGAVRRVVEPLGYLIQIKEWWLNNETPGTFRLAIGVQENGITEETFLELERLISDAKPVSRHLIGLSINLDVKGEFYCAATSYSGDDLTVYQYLPDVITTSDNAPLGAAIHLIETDTLRVSPZ

SEQ ID NO: 3670 - protein, 215 aa, Photorhabdus luminescens
MRIILLGAPGAGKGTQAQFIVEKYGIPQISTGDMLRSAVKAGTELGLKAKALMDHGKLVTDELVIALVKERIKQDDCRNGFLLDGFPRTIPQADAMKEAGINVDYVLEFDVPDELIIERIIGRRIHAPSGRVYHIKFNPPVVENKDDVTGEELTVRKDDHEDIVRKRLVEYHQQTAPLVSYYQKEAEADYTKYFGIDGTRKVSEISEELSKILDZ

SEQ ID NO: 3671 - protein, 397 aa, Photorhabdus luminescens
RQCSFRSCNSFDRDRYIEGFTMKYFAILTNLGAAKLANAAALGTKVDITHMAVGDGGGKLPDPDVNQTKLINEKRRAAINTLSVDPVNTNQIIAEQIIPEGEGGWWMREIGLFDGEGNLIAVANCPETYKPQLQEGSGRTQTIRMILIVSNTDSVTLKIDPSVVLATRDYVDSSIQKHEKSRNHPDATLTEKGFTKLNSAINSNDETTAATPKAVKAAYDNANSKLAKNQNGADILDKNAFVKNLGLLEKLIPIGVPLPWPTATLPDGWLQCNGAAFDKAKFPELAKAYPGGNLPDLRGEFIRGWDDKRGVDPDRTLLVWQEGSYLLQETQQAADNVVNFSVNERTKLQWDTPQNKDIPLRARASGGSATTWTTNAAYIGVSRPRNVAFNYIVRAAZ

SEQ ID NO: 3672 - protein, 200 aa, Photorhabdus luminescens
LMNKAVLDKNNIAISTGSIVVFNYDAITLEYLNSSDEYLPVGVGLPANSCTDVPPDTEEGYIACRSSDLTDWQIVPDYRGKIAYDTQTGEQKEIIKPGELPETLTCKQPNTDFDKWDGEKWVTDIEAQKNSQIEQAEQHRVTLRQQADEVMTLLQYAIETEMASDTEKALLLAWKKYVVLLSRVDTSMVSDVDWPQIPKZ

SEQ ID NO: 3673 - protein, 205 aa, Photorhabdus luminescens
YHYETIIIEIITDWRAFKNLGLIETVTKAADALQRSGGNVTGDITITTDSMLSWNRNTDFASIGFKNTGDGDADSYMWFKTGDNGNEYFKWQHALSGGPTNEWMSLKSDNLRVRGYQVYHEGYRPTAAIIGAYTKSESDTRYIQDIRFGAKESAQVQKSSGDTNASGYAITAVINGNRNELVDTVNRRPIQKKVNGIWMNISNIZ

SEQ ID NO: 3674 - protein, 391 aa, Photorhabdus luminescens
MAQDYHHGVRVQEINEGTRTITTVSTAIVGMVCTGPEADEKTFPLNTPVLITDVSLAIGKAGKTGTLPQALKAISDQSKPVTVVVRVAQGETEGDTTTNIIGTTTSEGKKTGIQALLAAQSQLGVKPRILGVPGLDTKAVAVELASIAQKLRAMAYISAYGSKTISEVIEYRKNFSQRELMLIWPDFLSWDTVSNKETIAYATARALGLRAKIDEETGWHKTLSNIGVNGVTGLSADVFWDLQDPATDSGLLNQNGITTLIRKNGFRFWGSRTCADDPLFQFESYTRTAQVLADTMAEAHMWAIDKPLTPSLVRDIIEGINAKFRELKSGGYIIDGQCWYDENANDKDTLKAGKLTLDYDYTPVPPLENMMLRQRITDRYLMDFAKSINGZ

SEQ ID NO: 3675 - protein, 832 aa, Photorhabdus luminescens
QMKCHYRNYWTGDIGPSYEVVQKMSNTQSQLKLVIQSVNKLTSALKSAQRNNKRLADSLRQNRDEFKRLNQTYEAIKSYSAPEYAQETAHTSDKKEENRGEGRYSKIKELRDRVSQYGASAKSAGSKILTTSKNFLMPGYDLNVQMSKIQAQTNIEKNSPEYAMLLNQSRELSKSTGIPASQIAQGQSLYASKGYSPDQIKNVMPGAVLMSQASGTDFANVVDISTNVLEGFKLQSEEMGHVSDVLTATLIGSKTTLAGLGDTMKSVAPAATSLGIDIETVAAATRKLSDANIKGSEAGEALSNVLSRLAEPPKAAAAVLKQLDIKTRDAKGNLRQLPDILVELDDKTRSMSGKQRTSYFTAIGGENAAPALDVLVNQAGQGGLQTFIAELKRVQGESQKVASVVTNNLTGDIQKLNAAWSNLGVQMFSGVEGPAREVTQQVTNVVNKVSEWMEANPRLAATLATITVVVGGILTVFGALAQAIASILLPLAVAKYSLTFFGSTGVRALGLVGNALKMLGSTMMIVGRLMMANPILAIIGVIAMAAVYIWQNWETLGPKISQLWENIKISLSEKWESIKQSVLQTWESIKTNISNAWELVKQNTLDIWENIKISISDKWNEIITDVMNLPSKFKEVGTAIVNSLLEGINEKWEALKNKLTSLSEYLPDWMRSKEDISKDASNNVSPNVSSVLPKHDKGGIIPAGRFGIVGEYGPEIVTGPVNVISRRQTAKLAAAAAFSLSVMAPSAAARTAPLHVQSLPVHAYPQIQEKKADKRQMVEYRSESPVYHINIYGAPGQSAQDIAAAVRRELDDRERKQQARLRSSFSDRGEFZ

SEQ ID NO: 3676 - protein, 368 aa, Photorhabdus luminescens
SQRGIVMTSEFGRGSEKGSAPAFLLEIDNKDISGRIQSRLMSLTMTDNRGFEADQLDIELDDADGSLVLPSRGNVISLALGWRDQPLISKGRFTVDEIGHSGAPDKLTIRARSADFRESLNMRREESYHKKTIGDIVHTIAARNNLTADLHQDIAKIFINHIDQTNESDGSFLTRLARQEGAIASVKNGKLIFIRQGQNKTASGAVIPGLVITRRSGDNHNFTLSDREAYTGVVANWLDVRKPEKKHTLTVERKSQKNADKLTSYLVGSKDNVLELSRIYADEASAKRAAKVAWEKIQRGAATFSIQLAQGRADLYPEIPIKVTGFKPEIDAAEWTLTTVTHTVNGSDGGFTTALTLELKIDDLDMKZ

SEQ ID NO: 3677 - protein, 370 aa, Photorhabdus luminescens
MMKNVGFIGWRGMVGSVLMQRMIEEQDFDVICPVFFTTSQHGQPAPDFTGQQGTLQNAFDIEALGALDIIISCQGGDYTNEIYPKLRATGWQGYWIDAASALRMNDDSIIILDPVNHTHIQQGLNKGIKTFVGGNCTVSLMLMSLGGLFANDLVEWASVATYQAASGAGARHMRELLVQMGSLHTQVAKELQDPASAILDIERKVTDFTRSGVMSTEKFSVPLAGSLIPWIDKQLDNGQSREEWKGQAETNKILNTGNNIITVDGLCVRIGALRCHSQAFTLKLKKDISIPEIEQLLAAHNDWVRVIPNDRELSMRELTPAAVTGTLDTPVGRLRKLNMGPEYLSAFTVGDQLLWGAAEPLRRMLRILIZ

SEQ ID NO: 3678 - protein, 260 aa, Photorhabdus luminescens
EIGFIRGDMKQDNLLDLKVRELRELAKTLSFRYLTHSKIRMDFNSKINLFVEDILGQVRIHCLSSNGAIEIIQFEIDHLKEQAFCLTANRVKQYAIIEREKEKSSYTNLILKQIGFVGGGTQILAGYTVCKASLGLACASFGAPLMAHGYNNVVENGYYLLYRENINGGVREGYRYVANKIGLSDKDADITYATVDLVLSGYGIFRKVLKPREKSWSLFRNINSDFIRGWREMGVVSLTTEGIVDVSTVLSIYQLEKEKZ

SEQ ID NO: 3679 - protein, 806 aa, Photorhabdus luminescens
LMSNTYDSSSIKVLKGLDAVRKRPGMYIGDTDDGTGLHHMVFEVVDNAIDEALAGHCSEVIVTIHADNSVSVQDDGRGIPTGIHEEEGVSAAEVIMTVLHAGGKFDDNSYKVSGGLHGVGVSVVNALSEKLELVIRRDGKVHEQTYHLGVPQSPLKVVGETEQTGTRVRFWPSMDTFRDNTEFQHDILAKRLRELSFLNSGVSIRLIDKRTNIEDHFHYEGGIKAFVEFLNKNKTPIHPNVFYFSTEKDGIGVEISMQWNDGFQENIYCFTNNIPQRDGGTHLVGFRTAMTRTLNSYMDKEGYNKKSKVSATGDDAREGLVAVISVKVPDPKFSSQTKDKLVSSEVKTAVETLMNEKLVEYLLENPNDAKTVVSKIIDAARAREAARKAREMTRRKGALDLAGLPGKLADCQERDPALSELYLVEGDSAGGSAKQGRNRKNQAILPLKGKILNVEKARFDKMLSSQEVATLITALGCGIGRDEYNPDKLRYHSIIIMTDADVDGSHIRTLLLTFFYRQMPEIIERGHVFIAQPPLYKVKKGKQEQYIKDDEAMDEYQLSIALDGASLYTNEHVPALRGEPLEKLVTEFNGVQKIIKRMERLYPLSLLNSLIYHPNLTEETLSDKAKVEEWIEMLVTRLNDSEQNGSSYSYRLHENRERQMYEPVLCVRTHGVDTDYLLDFDFVHGGEYHRITLLGDKLRNLIEEDAYIERGERRQPVSSFEQALNWLTKESRRGLSIQRYKGLGEMNPEQLWETTMNPETRRMMRVTVKDAIATDQLFTTLMGDAVEPRRAFIEENALKAANIDIZ

SEQ ID NO: 3680 - protein, 364 aa, Photorhabdus luminescens
MTLTRLLIRDFRNIAAADLPLATGFNFLVGSNGSGKTSVLEAIYTLGHGRSFRSIQAGRVILHGCDEFVLHGRLGQQENERERSIGLSKNRNGDSKVRIDGSDGGKIAELAKMLPMQLITPEGFTLLNGGPKYRRAFIDWGCFHNEPRFFSAWVNLKRLLKQRNAALRQVTRYSQIRPWDQELIPLANQINQWRGEYVTNITQDITNTCKQFLPEFTLSFSFQQGWDKESDYAELLERQFERDRTLTYTASGPHKADLRIRAEGTPVEDMLSRGQLKLLMCALRLAQGEYFTRQSGQQCLYLLDDFASELDTSRRQLLAARLKSTQAQVFVSAINPDQITDMLDGNSKMFRVENGKIEVQPQDZ

SEQ ID NO: 3681 - protein, 633 aa, Photorhabdus luminescens
MSMKGQETRGFQSEVKQLLQLMIHSLYSNKEIFLRELISNASDAADKLRFRALSVPKLYENDGELRVRLSFDKEKRCITISDNGIGMTRDEVIDNLGTIAKSGTKAFLESIGSDQAKDSQLIGQFGVGFYSAFIVSDKVTVRTRAAGASIDQGVFWESAGEGDYTIADIEKETRGTEITLHLREGEDEFLNDWRLRSVISKYSDHIALPVEIETKNKSEEEGEEDTVTWEKINKAQALWTRGKSEITDEEYKEFYKHISHDFTDPLIWSHNRVEGKQEYTSMLYIPSQAPWDMWNREHKHGLKLYVQRVFIMDDAEQFMPNYLRFVRGLIDSNDLPLNVSREILQDNSITRNLRNALTKRALQMLDKLAKDDAEKYQQFWQQFGLVMKEGPAEDSTNKEAIAKLLRFASTHNDSSAQTVSLEEYVSRMTEGQDKIYYITADSYAAAKNSPHLELFRKKGIEVLLLSERIDEWMMGYLTDFDGKKFQSVSKADESLDKLADENKAEQEEIEKQLEPFVERVKTLLGDRVKEVKLTHRLTDTPAIVTTNVDEMSTQMAKLFAAAGQQVPDVKYNFELNPDHQLVKLAADISDEVQFADWIELLLDQALFAERGTLEDPNQFIRRMNQLLLSEKAZ

SEQ ID NO: 3682 - protein, 367 aa, Photorhabdus luminescens
MKFIIEREQLLKPLQQVSSPLSGRPTLPILGNLLLQVTEGSLLLTGTDLEMEMMARVTLSLPHEVGATTVPARKFFDIWRGLPDGAEISVELDGDRLLVRSGRSRFSLSTLPASDFPNLDDWQSEVEFSLPQATLKRLIESTQFSMAHQDVRYYLNGMLFETEGEELRTVATDGHRLAVCSMGIGQKLPSHSVIVPRKGVIELMRLLDGGDTPLQLQIGSNNIRAHVGDFIFTSKLVDGRFPDYRRVLPKNPDKTLEANCDMLKQAFSRAAILSNEKFRGVRLYFSENQLRITANNPEQEEAEEIVDVSYQGAEMEIGFNVSYVLDVLNTLRCEEVRLLLTDAISSVQIEDCANHNAAYVVMPMRLZ

SEQ ID NO: 3683 - protein, 463 aa, Photorhabdus luminescens
VSLSLWQQCLARLQDELPATEFSMWIRPLQAELSGNTLALYAPNRFVLDWVREKYINNINGLLNDFCGAEVPLLRFEVGNKPVSQNDSPPQRVVTHTPVAPAPQNTSVRPSWDNTAVQPELSYRSNVNPKHTFDNFVEGKSNQLARAAARQVADNPGGAYNPLFLYGGTGLGKTHLLHAVGNSIMARKANAKVVYMHSERFVQDMVKALQNNAIEEFKRYYRSVDALLIDDIQFFANKERSQEEFFHTFNALLEGNQQIILTSDRYPKEINGVEDRLKSRFGWGLTVAIEPPELETRVAILMKKADENEIQLPGEVAFFIAKRLRSNVRELEGALNRVIANANFTGRAITIDFVREALRDLLALQEKLVTIDNIQKTVAEYYKIKVADLLSKRRSRSVARPRQMAMALAKELTNHSLPEIGDAFGGRDHTTVLHACRKIEQLREESHDIKEDFSNLIRTLSSZ

SEQ ID NO: 3684 - protein, 547 aa, Photorhabdus luminescens
MDSQRNLLLIALLFVSFLVWQAWEADKNPQPTTVQATQQTDMPSSENQAVPGSGKGKLITVKTDVLSLTINTRGGDIEEADLLAYPDTLGSNQPFKLLETTPAFTYQAQSGLTGKDGPDNPMNSERPLYTAAQDSYVLADGQDELRIPMNFVTKNGIVYVKTFVLKRGEYAISVDYRIHNTTEKPLQMTFFGQLKQSVELPKHRDTGSSNFALHTYRGAAYSSDDTKYKKYSFSDIEGESLSVTTKGGWIAMLQQYFATAWVPVANETSTFYTVALGKEMAAIGYKSAPISVAANSEKTVSSTLWIGPEIQDEMAAVAPHLDLSVDYGWLWFISQPLFKLLKFLHGFIGNWGFSIIVITFIVRGIMYPLTKAQYTSMAKMRLLQPKLAAMRERIGDDKQRMSQEMMALYKAEKVNPLGGCLPLLIQMPIFLALYYMLMGSVELRHAPFAGWIHDLSAQDPYYILPLLMGVTMFIIQKMSPTTITDPMQQKIMTYMPVIFTIFFLWFPSGLVLYYIVSNLVTIIQQQLIYRGLEKRGLHSREKKPAKZ

SEQ ID NO: 3685 - protein, 455 aa, Photorhabdus luminescens
MNTTDTIVAQATPPGRGGVGILRVSGPKAAQVAEVVLGKLPKPRYADYLPFRDVDGQILDQGIAIYFPGPNSFTGEDVLELQGHGGPVILDLLLKRILTLSGVRIANPGEFSERAFLNDKLDLAQAEAIADLIDASSEQAARSAMNSLQGAFSTQVHQMVEALTHLRIYVEAAIDFPDEEIDFLSDGKIEAKLDEVIVELERVRSQARQGSLLREGMKVVIAGRPNAGKSSLLNALAGREAAIVTDIAGTTRDVLREHIHIDGMPLHIIDTAGLREASDEVERIGIERAWQEIEQADRVLFMVDSTTTNAVEPVEIWPEFMARLPKSLPITVVRNKTDMTDEETSIAEVSGYSLIRLSARSGEGIDLLRDHLKETMGFSSNTEGGFLARRRHLQALNTAAEHLQQGHEQLVVARSGELLAEELRLAQQALSEITGEFTSDDLLGRIFSSFCIGKZ

SEQ ID NO: 3686 - protein, 417 aa, Photorhabdus luminescens
LNALLPWERTMLKTELLEIIANGENSGVEFKRDDIRPEQLAKEVVAMANFQGGRVLLGVEDDGTISGVQRHDLEEWVMNVFQGKIHPMMLPFYEEVKLDDGKLVAVISFPIGISKPYVVLHSGKEEIYIRVGTTSRLATREQQMRLFELGGMLHTEVMPVPRTDMSCLDDARLTNYVKDILRDPDVPKTPDEWQARLLGLGFLTEAAGSVCCTIAGLVLFGKSPRRYLKQAGLRVMVFHGEDKEYQAALDDIIDGPMVGRWDLENGDKRLVDGGVIERFIEAMSPFISQESDQVNEELRRETRWFYPLEAVREALVNALAHRDWTRFVEIEVSSYSDRLEVISPGSLPNSMTVEKMKAGQRSPRNIIVMEVLRDYGYVDYRGMGVRTKIMPLTKALTGKDPEFDLADDHLKTILFRZ

SEQ ID NO: 3687 - protein, 897 aa, Photorhabdus luminescens
ICLYKWSISMTIQTNKYAKARFFKCALQVNASGYIKYRGQQQALSEDDYNQQLLNAALEMRIEVIGLADHGSVNGFEKIRDLFTQHGIVVFPCFEVASSEKIHFVCLFDESESADQIKMHLGALDVDINQPEAPVQKSATDIINYVNDKGGFIFAAHCTNDDGVLKRRMNHIWQHKGLLAAQIPGSVEDLKGVESDFYRKVFLNKDDNYRRKREMAAINAADVAKPEEIKADGASCLIKMTKPCFTSFKQAFLDAGSRVRLNSDKSENYASAIERVRFVGGYLDGMDIELSDHLNAVIGGRGTGKSTLLECIRYAFDLEPFGKASKAQHDAIVKNNLGLEKGMVEVRVRSATMHGRIFTVSRKYGNQPVVVENENGRISPYHPKDLLPGVELYGQNEIYEMTRDEQSRNLLIKRFLESEHEQFDKAITEVLESLKDNRETIIRALSQKADVEAEVERLPKLLDQAKQFQALGIDEKLKVIPTLEKEKQLNERVNEEITRIKEAINILKDSLPDTVFLSDASLEGLPHSNLLKQKRQVLEMLKNSLTQCLIRVEELSSKASGDLLPLQQQLSERLRAEEQQLENAFKDIPASQGKTGRQIGAEYQTLLKQIEQIRPKETALQNRQTQLNELYSQRKKLLLELDQQTSARASAMQNSVKRLTRKLDQKVRLSLNSEGNRQELVNFLSDCNLEGIGQERLAWVLESEFTPANLAATIRQGEAELTSNFGISNSVVRALSRLPKRKLLELEELLLPDTMAIELNITHGEREAVFRPIGELSTGQQCTAILHLLLLDNQDPLILDQPEDNLDNAFIAERIVAELRRAKLSRQFLFATHNANIPVFGDAEWIGVLSVEDNKGLIRPEQQGAIDMPEVQKLAADILEGGKSAFNQRREKYGFNZ

SEQ ID NO: 3688 - protein, 440 aa, Photorhabdus luminescens
MAALDVYMNGYRVGVFTKANTGFHHFKYDESWLRLSGSRPISLSMPLRHQAYQGDEVYNFFDNLLPDNPEIRRRIVARHNAESTQPFDLLAKVGQDSVGALQLVPQGTSANDIKRIEYKPLSKVELEKVLTGYQAGAPLGMIEEEEDFRISIAGAQEKTALLNIDGNWCLPLNATPTTHIIKLPIGKIESHSHSIDMSESVENEYLCMLIARMFGLSVPHCLIMKVGEIKALAVERFDRKYSSDNSWIMRLPQEDFCQTLSVPSAKKYESHGGPGIPEIMSCLLGSVKAETDRYEFMKIQVLFWLLAATDGHAKNFSLFIEADGHYRLTPFYDILSMYPVFGGRGLHPRDAKLAMGLTGTRGRKYNIEQIFPRHFFQTAKVAGFDKDSMARILTEYAETVDTVVMNVRDQLPIDFPVHISNSILGGLQARAKRLKIGWDZ

SEQ ID NO: 3689 - protein, 569 aa, Photorhabdus luminescens
TDLCYFANREPPINWIQYDMKKKIISGVYLGLLFIATLILVFEKSEDIYPALIAVGMFGVIFGLVFFASARLLFSTAFTGTLFIIFKFLNQIKVHYYKEQLMFSDLNLMFDPANQETLRHYWLAGLGVVAMFIWLIFNMTLSWKKSSSLRGFKWRTVGLVLAAFCTWEVSATADAFREQWESSLPKGRGTVTNMVMSAKDAKYHAPQFGQSSDYFLQQAKNVVLPVPQSAIKPDVVMLLQESTVTPHIYQLPDDTRLPHLYMFQRDSGVSAQSPMRVQTFGGGTWLSEFSALTGLNTDDFGSRKNAVFYFIVDHLKYSLFREMKQNGYYTVVLTPFNKSSYHSGHAYQTLGVDRIIQPQELGYPASLDKNLWTISTQEMLGYVKEILAQETDKPLFIFSLTMYEHGPYDEDHADDYRLTGHVKNSQAVGKFSHYMEKIKASDPAIKDFSEFVAKREKPTMFLYFGDHQPNISLNQYNGVFSNPGHITQFTMRDNLQQGESIQTDELTDISFLGGMIMERAKLDASSFYRANMTMRHLCRGALDDCQDKALVESYKHYIYQQLDVAGKKZ

SEQ ID NO: 3690 - protein, 620 aa, Photorhabdus luminescens
MIFATAGHVDHGKTTLIQAITGVNTAHLPEEKKRGMTIDLGYAYWPQPDGSSVGFIDVPGHEKFLANMLAGIGGIDHVLLVVACDDGVMAQTREHLAILRLIGRPAMTVALTKADRVETQRIVEVRQQIEHELATQGWSESPLFVTAAADKESIVPLRQHLLQLHQQNKQHKKLHQRFRLAIDRAFSVKGAGLVVTGTALAGRVRVGDTLWLTGRDQQIRVRGLHAQNQQADTAQAGQRIALNIAGDVSKEQVSRGDWLLSRQPFEHVEKVLVEVETDEPLRNWQSLHIHHAASHITGRISLLNPLSDKPLLAELVLDSPLWLVEDDRLILRDISARKTLAGTRVINLNSPRRGKRQPAFLHWLTQLARTSDHAANLALHLPRGALSLDHFSWARQLTEATLHPLIVDQDMIIADGMVLSQNNAKLAKQKLLHVLAEYHQQHVDQLGLGRARLKRMALPTLDEALVYTLIDALLSDGQLKQLRGWLYLPEHGLSFSDEQAKLWQRIAPYFTDDPWWVRDLTADLKEEEATVRSLLKKAAQLGHIIAIVPDRYYCSQRIQQFADLIRQFNQDHGAITAADFRDQLGIGRKLAIQILEFFDRSGFTRRQAESHILRDNGLFZ

SEQ ID NO: 3691 - protein, 464 aa, Photorhabdus luminescens
MTHKPCLLYSQLPAIDRLLREPQITPLVEQYGQTLVTATLRRMQEQARINIKQYQALPDWCDNWASALGQQLEQKQALALKPVFNLSGTVIHTNLGRALMAESAIEAVTQVMRSPVTLEYSLNNAERGHRDHALADLLCELTGAEDACIVNNNAAAVLLLLATVASGKQVVVSRGELVEIGGAFRIPDVMVQAGCRLVEVGTTNRTHLKDYRQAINEETALLMKVHTSNYNIDGFTAEVSGRELATLGIASQIPTAIDLGSGSMINMVQYGLPAEPMPQDYLNQGIDLVTFSGDKLLGGPQAGIILGKKHWIEAIQRHPLKRALRADKMTLAALEATLRLYQRPEQLCQQLPTLRLLTRSQQQMHDMAQRLLPQLQAHYGDQFIVRDEPCYSQIGSGSLPVDRLPSWALTFAAVEGQGSSLERLARCWRGLAKPVLGRISGGRLWLDLRCLEDEKALLQALLLZ

SEQ ID NO: 3692 - protein, 700 aa, Photorhabdus luminescens
FSYTFREKIMEKLFNIYNHIAKPSLYVTLMSVSMLSHAAPANTISNANDKTIKQAEEKTGDTLVVIANNNAQDDGKISSNEIKVRQPQSVGEILKNVPGVQAGHPSGLGQRFKIRGMDDQFINITIDGARQEGYHFHHAGNYGIDPELLKQVDINIGSNSITYDTGAIGGALKFETIDTDDLLTPGQLFGAKSKLSYSSNGSEFQKSLAAYGKLGAVDLLGYVNHRNMHDSESGRDGRGRDSIPTDGKLLNYLLKTKFNLTDEQYISLSKEHYKNDAETNFRLNFGHDINNGKKGRYEIDRDTHNITYGYTPTDNDLIDLKISAYHTEQTFTHMKPVSGDGKGFDTIVKTQGIKLRNTSNFDTQNLFHSLTYGYEYFDTRMAYTDVEENINKKDIEKGKASSFYLEDDVQLGNFHVIPGIRWDHYKYQTVNKKEQPFEKSYSHISKALGLKYELGKSTTLFTNYTELFRGPLGKEIGLGLTNHSNNLKATTGYNLEAGLIGSYPAIFTDNDTLTISGKVFQTNFKNLSTTLANRELHNIPKARLEGFELSTGYRIKGLGLRASYAKVNDKIVKGNELFKEGLEFEPSLGDSITVGGSYLFDKTDIEAGWNSRFVLSKNSKGKGGKGGNSAVDVHKSGYGVSDIYIAWSPKTGTFKNTEILLGVDNIFDKRYNEHSYYLNTTQGQEEKGRTYKATISYKFZ

SEQ ID NO: 3693 - protein, 310 aa, Photorhabdus luminescens
MSIHIVPKEQLSKDRINEKTADYIPPLLFANLRNLYQRRAERLQQLAKESSFVDYLNFSAQVAEAQQKALHDNPLKMEIADILEKSVIEGKPPLDCKTFQRTEHWQKLLHSLIAELLPDASEHVNAALDNLEKASEQELEQMADALLKNEFSQVSPEKALFIWAALSLYWAQMANQIPGKARAEYGEHRQFCPVCNSMPVSSVVQIGTTNGLRYLHCSLCESEWHVVRVKCSNCEQTRDLNYWSLDSEHAAVKAESCGDCGSYLKILYQEKDPKVEAVADDLASLILDAKMEEEGFARSSINPFLFPNEZ

SEQ ID NO: 3694 - protein, 325 aa, Photorhabdus luminescens
KYRKGNSMLIDLITSYRKTAAIYTFVDAGLSIHFKNGDYVDINKLASQYGIDYSRLNRLCDFLIEIGVLVSSDHGVALSEECSALADPNSVEFLTVKYEINSEHWDSWLMYPKSLLENNGKSAFEMVHGKSFFEHLDSNKGLKSDFDALMSKYTNKIIKELLVIYDFDKHNRILDLGGGDGELLIRISEQVKGKDYTVLDRYNEVPISEGINFIKGDFFKPIPTGYDLYILKNVLHNWPDNDAISILKNCREAMDNNATLLIITLMKKPQSLVVKSVDILMDMLFSAKQRYLSEFEDIANQAGLVIRHYKDLDEIFSLIELKVKZ

SEQ ID NO: 3695 - protein, 318 aa, Photorhabdus luminescens
MLAELITSYRKSAAIYAFVDTGLSIHFRNGAYVDIDELSRQCGIDYSRLDRLCDFLIEIGILVNHGHKVTLSEECSALADPESMESLIVKWELSPDCWNAWSMYPRSLLENDGKPAFEITHGKSFFEHLASNKLLKSNFDSSMSKGSDKIIEKLLDIYDFGQYNRILDIGGGEGSLLVKMSEKVKGKHYAVLDRYDEIPVLENIDFINGDFLKVIPSGYDLYILKDVIHDWSDNNAILILENCRKAMDNGSAVLLISYMKKPQSKMVIYLDILMDVLFSGKERYLTEFERLANQAGLVIQDVKDIDESSSIIQLGIKZ

SEQ ID NO: 3696 - protein, 289 aa, Photorhabdus luminescens
RGYFTEMNLINKEKIRYVFSRIKRKGVLNTISGINRKYIKSKFIESFLSKLISSKLDVPDFPKIIQIETRSGCNYSCSFCPTNKVKMKQGKMQQELFDKIVEQLKDFNGYISLFFRNEPLMDKRIIDWAQKIKNETNAKIIIQTNGSLLNETIAKELGQYAELIVNDYTDDKIVLKKIKKWEENITDNLIFVTRDNSESLTNRAGNIGEKKKVFLNNSCVKPFTELTITFSGTVVLCCQDWMEEAIIGDLNHQSILEIWNSNNLNEIREQLKNRNRIGICEYCDFVGVZ

SEQ ID NO: 3697 - protein, 398 aa, Photorhabdus luminescens
RIEIESEYVNIVILLGYKMMNIFKIMQKQVSKCYVKGNDWNYSKHKDIYLHFSDERCYEVELKECAQLSYIKNADSIILLPTLWGRCDKSEILEAIQRGIEQCIKFNSVLMVSIQSNYSHREDIIDSVQKLLNENEVYDKLILFLTDIRSKAYSINQTVLLARRINCSAVGWMDDDVILSDDAFLQLYEDLRRRGFIGSSGALKCPTPKKYPTSKFLNFAKNKMSTKKTKYPHGCCMMVGVSSIKNLIPARYICDDGFFFFELLDMKLENPQNNMRIVEESICQHYVGGNVKDTYFRIRRSIISTVVYCADYPLDKCLYYLKEVQFNGLFPAMFINIPIKDKIIKSILKFIFLIWHVIILIELFFRRFSGNPLREIAWSAYSWEKTESLKEKKSLFDZ

SEQ ID NO: 3698 - protein, 257 aa, Photorhabdus luminescens
INNVKIGFTMDICKYMSSCRKSIIPILDPFKFNYEININRLLTFQKYAPFCIIASTDCENFEMKVSPFIAAASKIKTIPIITHFPPQKPNGFPSSPHADAFFATSVINSNVEYYSSLSLERESIKQSIEKYGDNCLISSAALVLGNDKKSQKFVYSKTVDHSTESIARALEGIDFNLLKVFYLYSRNSVISNEICSFVKFIVGDNTLLFVSGGISNTEQVNNLLYSGADFISIGTTFEEVNWNNNAINILNKERIYZ

SEQ ID NO: 3699 - protein, 476 aa, Photorhabdus luminescens
KYTLVSNYGIKSGSGIMNTTWHEKKTIYNDLNQLHGVYVILMEEYLSTFCTNFGGMYSIPPLAVVCVKNTDSIIDIIHYCNINEIPINIRGVGHSFGTQSLSKGIVLVVSVENPVFEKIDEYKFKVSAFETWLSVECFLRKNGLSFPILTRHPDTTVGGTLSVGGYGEDSYLYGSQASCIQSYTLITPDGKRHRCSEDSNSELYNFGLASLGILGIIEDVTFEAIPLRVENILYVIEFDGILHLLSFLILISEYSNLNIEAVTCQLYRRKYYVNMVLSNNSDQINIVNKVLECQVTGCIGYKYHSVRDYRGRTFGAYRHDLWNRDYVNLWGDYCVDQNNIMAFANFLLNKVINNDVFISNKGRLLIILKKSPSLSKFFPFEPISKKMSGIVFGVGVYFTFPRNESKEYEKLKLLHSQILEECILNEGRPYLAGWHEMKYEDKIKIYGDDYMKILELKKHLDPKGIVNNYDFFMEYZ

SEQ ID NO: 3700 - protein, 370 aa, Photorhabdus luminescens
MKKILIICMRTWGRMGNYEAAKKIESELASKAFFSTELICFDELVPVFSKFGLRMQEISASYYDPHIKLKLYDELIDDIGLWISNFNNEQVLNESLSSVIENDFPSLIISTKGVIAKIVHAFKEKFYFDFKTVNFITNPGLLDIKIHQHFSSDLTIRTTNYYPNSDMVEKFHRLETVPLFKPVSNYQIDQQDIPSILILCNGCEEGYFDVLKTSFEHPSKPKIFMVIISNKKLYDECIDLNRKYADRACIYNTLANKDYLKLILEASTNSRSFLYSKSGPNTVLESIRFNLPVLIHFSGLPMERWIVELTNKRKFGFCFENQSNGPGIIKKWLDNPEIVTNFKRNIELSEIDDIDITLKDLPDIICDVMZ

SEQ ID NO: 3701 - protein, 205 aa, Photorhabdus luminescens
MFKIEKAPITTVFIVCVTIVYSTFVSYSLTDSFIGKISIIELEKYGGLTPNRLYEFEYWRLLVSQFIHVKQLHMVYNVLSLSILGILLEKHLGSKFLLVLWFISGALGTLYSTNFVSYPWNIGTGASQAVLGVSSFALLLVFVKEHTSSILKFAVVFSMLPAIALDFIYAHYPKPGHVLSICIGLTMSLFFYRKNKSYFDNVAIZ

SEQ ID NO: 3702 - protein, 416 aa, Photorhabdus luminescens
KMTGIKRKGSSVRDIVFFLEEYPVLTQTFIHQQIISLKKEGFNVRVVSVSKSSDTICANDSTIPYVCLEDIKNIHPIYAIFKFIYFSITSGYFFSRMSLFKRNCYRKRLLFKFLSNPSQIKPNDIVISHFGMASIMAAQLKKYGYIKSALYSVLHAYEMTKEKSLNDLGNHYGILFEQANKIFSVCEYMRNRIINLGCHPTNVEVLHLGIDIDALSCLYPNESNKEKMKIIFVGRLTEKKGLPDLLLSLARISSEVSFTLDIVGDGELNDYCYELILKLNLNEHIKMHGFQPHHIVLNFMKDADVLILPSKTSNSGDMEGIPVVLMEAMAMKKIVLSTYHSGITELIENNVNGFLVNEGDIVALSEKISYIDELGKKDKNIMRENAHQKIMNEFNINIQSKHLANIILNEEFSEGZ

SEQ ID NO: 3703 - protein, 202 aa, Photorhabdus luminescens
MQTSPLLESLMEALRCLPGVGPKSAQRMAFHLLQRNRSGGMRLAQALTRAMSEIGHCKYCRTFTEQEQCTICANPRRQQNGQICVVESPADIHAIEQTGQFAGRYFVLMGHLSPLDGIGPMDIGLDRLEDRLATEEISEVILATNPTVEGEATANYIAEICVQYGVTASRIAHGVPVGGELEMVDGTTLSHSLAGRQKITYZ

SEQ ID NO: 3704 - protein, 237 aa, Photorhabdus luminescens
IQMKYDIVFISYDEPCAESNWNHLKNRFPDAKRIHGVNGILNAHKVASDSVTAKWFFVVDGDSKIRDEFNFELPVEPLCSTATYVWRSVNSVNRLCYGNGGVKLFNKRLFQDVKNFSGDMTISLSPDYRVVNIVASDTVINTSSFHSWRAAFRECIKLSIPRKNPKEDIICKERLTAWSLIDTQIEFGDWISKGANDAAHFYEENIENMEFLLSTINDFKWLRDTFNLKYIQKDRAZ

SEQ ID NO: 3705 - protein, 298 aa, Photorhabdus luminescens
WMLRQVAILIPTYKRSSSLLRLLKSIEKLETSNNYTAIVADNDSSQKESFNMINEIKDDFNFHIDVILVEDKNISLVRNMLLTLAFETYKCDAVAMIDDDEIVSSRWLDALIECQIQTNSDVIQGNTYPIFLDKKRKWMEKVSFYYRDLLVSDSKDINVSTCNVFIVRRVYESMKEQLFDLNFGVTGGEDTDFFHRAKQIGISCFYCRDALAYEFYDQNRANIFWVLKRSFRVGRTNYRIFNNNDLSKVWITALIIPFTIVRLVFFFWHPNLYIHYLIKIFRQFGVVVEGVHCNLNNZ

SEQ ID NO: 3706 - protein, 338 aa, Photorhabdus luminescens; identical to SEQ ID NO: 778

SEQ ID NO: 3707 - protein, 267 aa, Photorhabdus luminescens
FPVNDFYIFRDRYSKRGSMDDIKECLKEIVEKIKREEKVLAILGYGSYFTGKYKNGSSDIDLLIIHGSKIDLFRKKVVYREVEFELRYMAEKSLVKLLSHKHGPTIKHMLDSEIIFDNKNIARELKLKTYSIVESPIVETFSIENRRKSALLIESLYRKVHQVKYDLGFFEFACSKFLLNIADSYIRLHRHWGLQGFRKMISQLKDIDESFAEHFSLAMSPNHIETRIKEIDFLYREVIMLLGGETNSDENFVSQGIMNILNVVDNZ

SEQ ID NO: 3708 - protein, 383 aa, Photorhabdus luminescens
IHGYFIVVNYINIIQEFSMKMDVALKDNFATGYIKSLLLYSLLLSVISSFAAFFMQYLIDAVIPSGDLRFLFIFMISYLLYESFNMILTYLTARFRASLEKYLDYYYLDKYLLALITTRLSILNDYNKGGLIQRIYDAQNIKKYYLTLLIDIVVKLITILILSIIVLYVSPLVVSFLILGMIMLVIVYFLSVKKMIILEEQRFKIKSNFLSIMDDIIGGRETIRGNNYRNRILNRCVDRMNDFLNREKNVALLVAGVKSKTLTVNTIIGTVIRCVMVISIIRYSSFSLGIMLTLIAFTEMSLKHTMQILVSFMELKRSSITLERYKEFMGNNVVDESLLNTELDDNIVSVDEITVRNLHIGTNGNIVCKIPDFTFQSNKIYPZ

SEQ ID NO: 3709 - protein, 356 aa, Photorhabdus luminescens; identical to SEQ ID NO: 52

SEQ ID NO: 3710 - protein, 408 aa, Photorhabdus luminescens
RLLMNKLNSNNEVKSELHKEYKLIISITVFLLIICFALSFVVTIKRRVVLENAFIKTAPEPVLFYAEKDIDIKNYNVRDGDVVKKGDSIYNAINPDLEEAESILLQNIKRDNTKINAMEKYIDNVYERMKIEKNYEDFKFNKNESELKNIDSILKDHRDDYDFFSQSYREQMNFVDKLLNQNNNYLSKKDIIKYKMELFSSRRGLINLESDILDLEKRKYSLDDEQSRYIIGATKYKELDMELNQLRGELSVLVSELNVKNTGMENIKNGKLRIEGIAKADGKVEFNNINGIRPKQVKKGELVFTIYPDGNHFIAKGVVSEKYIRKIKIGQSVELKMDAYDYLKYGAIKGKVEAIFGVKNGTAEIVINIVDKRDFDLEFGNSIKAFIILDEVNLYEYIYEIVFPYVAZ

SEQ ID NO: 3711 - protein, 524 aa, Photorhabdus luminescens
GLLCFDKSYTRYLSSCLFVGCTRSPRSHRYLCSRGFAPLPSRSLLKSIGYIYLKLTALILDEQYAQPVYNRRPKKRYMMTATNFSELELDERLLDALNDKGYSRPTAIQAAAIPAAMDGRDVLGSAPTGTGKTAAYLLPAMQHLLDFPRKKSGPPRILILTPTRELAMQVADQAKEFAAHTHLDIATITGGVAYMNHAEIFSENQDIVVATTGRLLQYIKEENFDCRAVETLILDEADRMLDMGFANDIETIAGETRWRKQTMLFSATLEGEAIRDFAERLLEDPVEIDAEPSRRERKKIQQFYYRADNSAHKTALLCHLLKQPDVTKSIIFVRKRERVHELADKLHQAGIKARFLEGEMVQAKRTEAVKLLNDGSVTVLVATDVAARGLDIDDISHVFNFDLPRTADVYLHRIGRTARAGRKGTAITLVEAHDHPLLGKISRYLNEPLTSRVVDELRPTTKAPSDKARNKPSKKVLAKRKEKKKAEESKKKAKIRHRDSKNIGKRRKPSGNPKPETPVSSDAZ

SEQ ID NO: 3712 - protein, 245 aa, Photorhabdus luminescens
LKQKRLLRRDGFTFKQFFVGHDRCAMKVGTDGVLLGAWTPVSDKKAILDIGCGSGLIALMLAQRTDENTKIDAVELDTEAALQAQDNAEQSPWQRKIDVYQQDIGDFAEQYSQCYDLIVSNPPYFEPAVACRNEAREQARYTGSMTHQQLLQYAETLITADGLFCVVLPYAIGEEFETMACHQGWFSHHRVNIRDRQGKPLHRMLLAFSRKEKTGLISELTIRQPDGAYTQEFQQLVTDFYLYYZ

SEQ ID NO: 3713 - protein, 535 aa, Photorhabdus luminescens
MQSLSSQHYSDVLIIGSGVAGLSLALRLASQYKITVLSKSILSEGASYYAQGGIAAVFDKTDSIASHVEDTLIAGAGLCDKSAVEFITSNARHCVQWLVDHGVMFDTETSEDGEKQYHLTREGGHSHRRILHHADTTGKEVETTLVDKAMSHPNITVRERCNAVDLITSNKARLDGENRVVGAYIWNRQQEQVETYRAKVVVLATGGAAKVYQYTTNPDISSGDGIAMAWRAGCRIANLEFNQFHPTCLFHPQARTFLLTEALRGEGAYLKRPDGSRFMPDFDERAELAPRDIVARAIDHEMKRLGADSMFLDISHKPADFIIQHFPMIYEKLLTLGFDLTKEPIPIVPAAHYTCGGIVVDHQGHTDLNNLYAIGEVSYTGLHGANRMASNSLLECLVYGWSAAEDIQQQIETIEEVPQLPFWDESRVDNSDEQVVIQHNWHELRLFMWDYVGIVRTTKRLERALRRINMLQQEIHDYYSNFRISNNLLELRNLVQIAELIVRCALERKESRGLHFTLDYPDLLPESKPTILTPZ

SEQ ID NO: 3714 - protein, 659 aa, Photorhabdus luminescens
MSYQVLARKWRPQIFSDVIGQEYILTALANGLAHGRLHHAYLFSGTRGVGKTTIARLFAKGLNCETGITDKPCGKCVNCLEIEQGRFVDLIEIDAASRTKVEDTRELLDNVQYAPARGRFKVYLIDEVHMLSRHSFNALLKTLEEPPEHVKFLLATTDPQKLPVTILSRCLQFHLKSLDIGQISDQLERILKAEHIESDNRARQLLARAADGSMRDALSLTDQAIAIGQGLVTTEIVSLMLGTLDDEQPLSIIEALIRADGQQVMALVEQVASRGADWEDLLVEILALLHRIAMLQLLPSQPESDSSSIEGRLRIVAKAVSPEDLQLYYQTLLIGRRDLPYAPERRMGVEMALFRALAFHPKTVIEEVAAPVVHPAVIPSVTAQPKHSAQGDVPPANDINEPAPLDRASQSEPQIPQALASSPTAQLLKARNVLSRQQEQTPTKKPESAMPVKMKSATSALERLAAVSGQRPQSSIDKKQENKPEKKEAYRWRAKNIEEKTETHVATPKALRTALEHEKTPELAEKLTEESKQRDAWAAEVGKLKIPKLVQQLALNAFKEQISANNIRLHLRSSQRHLNSAFAQKSLAGALSELYGVTVEFSIIEDDNPAEKTPLEWRQAIYEEKLAQARQSIIADKTIQTLRQVFDAELDEESIRPVZ

SEQ ID NO: 3715 - protein, 217 aa, Photorhabdus luminescens
MQREKLSALMDGETLDSEVVSILSKDSVMQKHWENYHLIRDTLRGDVTEVLHRDIASRVAFALEKEPVHSNLGDIPESQPQPETWQKMPFWQKLRPWVSQMTQVAVAACVSLAVLVGVQQYNSHSAEDLEYQSDTPAFNTLPMMGSASPVSLGVPSGDDVFGNDQRLQMQERNKRINIMLQQYELDRRVHFKQNDERGISPQVVIPVPGTQSLGTQZ

SEQ ID NO: 3716 - protein, 319 aa, Photorhabdus luminescens
MKRIWFSVCLLAGSLFAPLQASAQLSSAEVLLQEMGNATRSLTYELAFINLNPQAIVSVRYRHAIINGIPIAQIMQMDGSRREVVQRGNEISYFEPGLDAFSLSGNHIIDYLPAVIFADFNQLKKYYNFIDVGRTHIGDRPCRVVRITSKDEVRYNYILLIDEETHLPLRIDLLDRDSEALEQFRVVSSTIDGDINDAMSVITRLNMPPMLVIPPSEKVVFNWKVGKLPIGFVEVSRSRRKLPNSGTLESVMFSDGLFSFSVNVTNADKTGKLEYPLRRGARTIYSAIRGANEVTIIGELPLATAKRIAAGVAFIGADZ

SEQ ID NO: 3717 - protein, 599 aa, Photorhabdus luminescens
MKQIRNFSIIAHIDHGKSTLSDRIIQICGGLTDREMAEQVLDSMDLERERGITIKAQSVTLDYKANDGQLYQLNFIDTPGHVDFSYEVSRSLAACEGALLVVDAGQGVEAQTLANCYTALDMNLEVVPVLNKIDLPAAEPERVAEEIEDIVGIDATDAVRCSAKTGVGVQDVIERLVKEIPAPEGNSDEPLQALIIDSWFDNYLGVVSLVRIKNGTLRKGDKIKVMSTGQVYNADRLGIFTPKRVDRDVLGCGEVGWLVCAIKDILGAPVGDTLTLARQPAEKPLPGFKKVKPQVYAGLFPVSSDDYEAFRDALGKLSLNDASLFYEPESSSALGFGFRCGFLGLLHMEIIQERLEREYDLDLITTAPTVVYEVETTSHDTLYVDSPSKLPPLNNIEELREPIAECHMLLPQEYLGNVITLCVEKRGVQTNMVYHGKQVALTYEIPMAEVVLDFFDRLKSTSRGYASLDYNFTRFQSSDMVRVDVLINAERVDALALITHRGNAQYRGRELVEKMKELIPRQQFDIAIQAAIGNHIIARSTVKQLRKNVLAKCYGGDVSRKKKLLQKQKEGKKRMKQVGNVELPQEAFLAILHVGKDNZ

SEQ ID NO: 3718 - protein, 327 aa, Photorhabdus luminescens
MANTFALILTLATLVTGIIWCIDRFKWAPERKKKLARLQELTEGTMDQEHLAETINKPTWVDTCSSIFPVLAVVLILRSFVYEPFQIPSGSMMPTLLIGDFILVEKYSYGLKDPITQTTLIKTGEPKRGDVAVFKYPLDPSFDYIKRVVGLPGDKIIYDPAKKELRIFSNCSETGNCQGELPVSYGSLFPSEWTMQQYGVDSKGESLRKVGVFQIPVEETLPPYSMRQGERIENLDAVNHHILEIPGVLSVPNFRQPGLPEGMWIVPEGHYFMMGDNRDNSADSRAWGFVPEKNLVGRASAIWMSFEKQEGEWPTGVRFSRIGGINZ

SEQ ID NO: 3719 - protein, 227 aa, Photorhabdus luminescens
MNPIVINRLQRKLGYTFDQYDLLIQALTHRSASSKHNERLEFLGDSILSFVIANALYHRFPRVDEGDMSRMRATLVRGNTLAELAREFELGECLRLGPGELKSGGYRRESILADTVEALIGAIFLDSDIQSIERIILSWYETRLNEISPGDKQKDPKTRLQEYLQGHHLPLPSYLVVMVRGEAHDQEFTIHCQVSGIEQPVKGTGSSRRKAEQAAAEQALKQLELEZ

SEQ ID NO: 3720 - protein, 303 aa, Photorhabdus luminescens
MSEQETYCGFVAIVGRPNVGKSTLLNQLLGQKVSITSRKPQTTRHRIMGIHTEGAYQIIYVDTPGLHIEEKRAINRLMNRAASSSIGDVELVIFVVEGTHWTPDDEMVLNKLRNLRCPVLLAINKVDNVTDKTSLLPHIGFLSKQMSFLDVVPMSAEKGMNVDTIAKIVRGYIPKAAHHFPEDYITDRSQRFMASEIIREKLMRFLGDELPYSVTVEIEQFVANERGGYNIHGLILVEREGQKKMVIGNKGSKIKTIGIEARQDMERLFDAKIHLELWVKVKAGWADDERALRSLGYVDDLKZ

SEQ ID NO: 3721 - protein, 242 aa, Photorhabdus luminescens
VDGWQRVFVLHGRPYSETSLLLDLFTENEGRISVLAKGARGRRSNLKGCLQPFTPLLVRWSGRGAIKTLRDADPISLALPLTGSVLYSGLYINELLSRVLEQGTAYPALFFDYLQCLQILAASEYTPEYALRRFELALLANLGYGVDYLHCAGSGEPVADTMTYRYREEKGFIASLVVDHYSFTGRELKSLATREFPDSATLKAAKRFTRIALKPYLGGKPLKSRELFRQFVRQQPEKKENZ

SEQ ID NO: 3722 - protein, 244 aa, Photorhabdus luminescens
MAEVLLGVNIDHIATVRNARGTHYPDPVQAAFVAEQAGADGITIHLREDRRHITDRDVELLKKTIQTRMNLEMAVTDEMVDIACRIKPEFCCLVPEKRQEVTTEGGLDVIGQKDKVAAAVKRLSDAGILVSLFIDAEHRQIDAANEVGAPFIEIHTGAYADAKNEVEQEKEFHRIKAAATYAASKGLTVNAGHGLTYHNVQRIAALPEIYELNIGHAIIGRAVFSGLTAAVADMKTQMRKARRZ

SEQ ID NO: 3723 - protein, 254 aa, Photorhabdus luminescens
DININLLLNLRKIDMNPKNDFKAFSIRDGANVVAQNLYENSPELQTGFSPDGLTLHILNKALRQSSTISSVVADFIATESDSDVLDDGNITKLTTQLNRALERKIITKISDSALEKAKNGADIPNKNAFLKNLGLNEAAKREVGIGVNQIPDMSFFTKNLAETGWQKLPSGLIEMWGTALVKGNALSSPGNLNKFPIPFPNKCLNVTLTHLGTAPQYAGIFSVMIVDNTQFQCFSSITDLQNPVAAYYRAVGYZ

SEQ ID NO: 3724 - protein, 259 aa, Photorhabdus luminescens
ESTIMSSRWVSNELVKLSSESLQAIIDNKIPAAMIDDFATTEETEQLSSAILSIKAKPYEFGRPGFYLGNTLAHYRDRPKEQYFSQVSVAEQDRIQIINQAFDPVDRFMRYTNHDTNFSISVAEEPGFGPYFAGIVRIISGGSDLHVDYAPTFAKGNLIIGDISTQLAWNLYILSPSQGGETVIYNQPFKSTVVDKTYKPYDSSLLVDCESFTFRPQVGSVVIFNTTNPHIVLPASGNRIATGSFIGVLNEKKLILWSZ

SEQ ID NO: 3725 - protein, 282 aa, Photorhabdus luminescens
LIGEKYMSQKNDFKAFSISENANIMPQETYEKEQKLQTGFPTADITPELLNKALRQSSTISTVVANFIATQSGEDVLDNGDIDKLTTQFKKSLEQKNTTETRDASLTEKGIIQLTDQIGNSNTLAPTQKLVSDVNDNANNRLAKDQNGADIPDKAAFIKNLGLSDSTNITIGNGENQVPNMSFFTSSLNQVGWQKLPSGLIEMWGIASVKGNAYAEPGALNNFPIPFPNKCLNVTLTHVGNAPQHAGTFSIMMVNNTQFQCFSSIPNLQVPVAAFYRAIGYZ

SEQ ID NO: 3726 - protein, 334 aa, Photorhabdus luminescens
LNMLITKQYYTLWISRCIATARERIPGSIDNYVTGVRECSQQRGNLKDNGYIYLRNICMNHKNDFKAFSISNNANVVSQERYEESQSLYSGFPPDNVPTHLLNKALRQSSTIASVVADFIATESSSDVLDDGNTTKLTTQLNKALDQKLTKKIPDASLTQKGIVQLTNVVGNSNTLAATQKLVSDINDNANNRLEKTQNGSDIPNKNAFVKNLGLNEAAKRAVGTGVNQIPDMSFFTSNLVQNGWQKLPSGLIEMWGIARVSTGGRPDLGYLNNFPIPFPNKCFSITLTHNDWDPRAAGIFGASVVNQSQFKCYRGSGDGQPFVYTYFRAIGYZ

SEQ ID NO: 3727 - protein, 429 aa, Photorhabdus luminescens
SKEYSMSPKNDFKAFSISINANAASQEKYEESQNLKTGFAPDGITTNILNKALRQSSTISSVVANFIATHSGNDVLDDGNIDKLTAQLNQALEQKMAPKVPDASLTQKGIVQLTDVVGNSHSLAATQKLVSDVNDNANNRLAKNQNGADIPNKNEFVKNLDLLETVNLAKNAVPNSRKINGKSLTGDINLAAGDVGAFRLGLTGKYSVDNQVPWNVDSGSYDLLHAKFSDHVVHFYNGAGNCPAFQLKVHYKNGGIAYRSARDNYGFEEDWTSIYTTKNKPTVNELGLSETVTLAKNAVPNNRKINGKALIEDINLEARDVGAYSRSESDERYQKKGPNQGWRKIGRSGDSGSSILLSQDIRGRCIYLRTGSPGIFLPLQMPPIDNILVGTGYGSKGWLVVHSSDGGVRLSIVNKEDCPDITEIYIADZ

SEQ ID NO: 3728 - protein, 255 aa, Photorhabdus luminescens
HVNYNRTLFYLRKVYMSPKNDFKAFSINNNANIVSQQEYENRQDLKTGFPPEHITIHVLNKALRQSSTIASAVADFIATQSGDDVLDDGDIVKLIAQLNRALEQKIITKISNSALEKAKNGADIPDKNTFIKNLGLNEAAKREIGAGVNQVPDMSFFNANLGSTGWQKLPSGLIEMWGFVLVQGYGSMEAGYLNNFPIPFPNACLNVVLANGGYNPQDSGICSVHVVDRSQFRCYRSPTNHPTPVGAYFRAIGYZ

SEQ ID NO: 3729 - protein, 200 aa, Photorhabdus luminescens
MMNKAVLDKNNIAISAGSIVVFNYDAITLEYLNSSDEYLPVGIGLPANSCIDAPPKAQEGYIACRSPDLTGWQMVPDYRGRIAYNTQTGEQKEIIKPGELPETLTFKQPSTDFDKWDGEKWVTDIEAQKANQIKQAEQQRVILRQQANEAITLLQYAIETEMASDAEKALLLAWKKYVVLLNRVDTSMVSDIKWPQIPEZ

SEQ ID NO: 3730 - protein, 229 aa, Photorhabdus luminescens
PILRFTGTSNTFQYLSNTGSIIKWIDQRWRWDGFIHHHNQVITASLIETDITVTNKHLRPFKRLIAAYINAMFAITMTNVNHHIVVTESQRFKTTGSHFNTYVRGSPIKRRKLSFTDIHLDITGVTELTMRVIAGINLFTLLWLNENFCVIRNFPFGNRISLRVPNFSEVDIAFSNTTTNLFGMRYQFILRIQAQYNFVIRRVVNPLVIFVTGKFTACCVNRNFATTGZ

SEQ ID NO: 3731 - protein, 3547 aa, Photorhabdus luminescens
KITGIFNLNLIKGLFMGKSSNRSAEFFFTGKYDDDDGGNNIVAIGLGGEIYAKGGNDHITVGSLGATIYASSGDKTVDGGAGYLKIVNIGGDLKVHGAAGYASIDKNGNGNISFIGAAGGVSMDHRGSSGNLNFSGAAAYNNLSRRGQSGNVTFKGIGGYNGLWHETHQGDLNFNAAGAGNKIDRTWHDRYEGSKGNVIFVGGGAANSISSRVESGNIEFTGAGVDNHIIRKGKEGNIIFQGAGALNRIERLRDSKDKYEQTRGNIEFEGAGGYNKVYSDIAHGNIRFSGSGGYNEISRIGEDSDSYNKALGYASAEKIVLITAKMGSQKPQQVTAIKSTTESNTYLFAFADGKYTKISKVQLKNDPKTNKLSYYSTSWRKNGNQLKNLATENISLENGYDDISNDGDYRLSNLIFEHHQPVTIQHTVEEDLRENQWVTYASGTTAKAEDIKLIDAKMHGRSIHSNGSVLDVSAVKSNRRSNAYVYAKYVESYTKVVVVELKNDDKTGELKYYASAWYKAGDHTRDLANEDFSRANGYSSMEVGGYSLTNLKYQVDTVRRVSEHLEHIEEDSLQEWVKSSSNIGDSSGDVNFSGMGGGNLIKSSVINGNVNFEGDGIANVILHSSRSGNTHFEGAGAANIIEKSGIDGNLTFRGAGLANVLVHQSRNGEMDVYAGGAANVLVRVGDGRYLARLLAIGNISIHQGNGDSRVVMLGGYNTHTQIGKGSANWLGAGGFNVMTQKGKGSISSLLLGGANVLTKLGGDNLVSGMLGGANIITHISGDNEISDTTAIALGGANILTKKGRGDAVALMGGGANVLTHIGYGSTTGVMLGGANILTKVGNGDTTGIMLGIGNVLTHVGDDQTLGVMGAAGNIFTKVGDGTAIAAMIGAGNIFTHVGKGDAWALMGGLGNIFTKVGDGKALALMIAAGNVFTHVGNGMSVALMLAKGNIATKVGDGTTLAAMIGEANVMTHVGNGSTFAAMIGQGNILTKAGNDLALGLMVGEANIYSHVGDGTSIGLLAGKLNVMTKMGDGTTLAAMFGEANIMTHYGDGLTGVLALGKANIVTKVGKGFMGVVAAAEANVVTHMGASTTAAVLLGKGNILTKEGSGTTVGLLISDVGNIMTHIGDGTTVGFAKGKANIITKVGEGTGINAVWGEANILTHVGNGDRYNFAKGKANIITKVGGMREVTVVQGDANIITHVGNGDDYTGAWGKANVITKVGDGNNVVLAKADANIVTQVGNGDSFNALWSKGNIVTKVGDGMQVTAAKGKANITTTVGNGLSVTATHGDLNVNTKVGDGVSVNAVWGEYNVNTKVGNGLNVAIMKGKGNANIHIGDGLGINASYARNNVAIKVGNGDFYSLSIAESNTQSSHLSSLFENIKQTVFNVEGSQTINYLIRGDEANTSGVNKGRGAINLTEVSAIDGFQMDKIDEVSSDLANNLSGAITPVETPDINVIQNDLQIGDNVGSAQDQASPHADAVVRHAKQNKAAQNALSDKEKAEINHQRLQQEKDKQLKTISKSQGQLESTNQAALNTNGQVQRDVISEESRGVTEELFSLTQGMGALNNYGNYDGKSGDEWRNRFAGGYLDNIQNKLNDAKLTAQKKLADAQQHFIDKRETVITAIKKSEVGFTKSAENLDSADDDIVDAEKKAEQRKEEALLQKQRADKAVSDANTAYDKAKQRGESDSTAAENKTIQAQKNAKSVKQADNAKPDRTGAAGSGLSGNAYIPIEVEKSKSHIDPASKAEPDGWLSEDLALTAEDLAALNNAQQAVNRLQLNKGMRSENTGASIMSMFTETSSDGAVKSTLNKSRELIRKAPTISGIDLQGLGGNNPRSHSSVLKKLELILLKKDNKRFIDSTKRRLGSINTDLPSKALVAVREAFNRTVEQPDEQHVLQLEQTLAHWQQHDPKEFTQRSKLVKSLRFEMGELVAHIQAQRAESAGILGIAVAPEQVTQFGQQVSFDGIGRVVGLKGDIAQSEINRLTDLQIKPLTQTNSVAEREAPKTENESLIVFVSRLQQEAIPEGKPLIERARKLWLTGQVTNEKTKELFKDAVAQLQTYPELHTLAQQLLTDANKEKATGQYIDNLFGRHFDSELAYELVKTASPEAKNTAERTGNFLVEDFERWIGDLYPEGEKRNGAIDKKMKSFAEAIDKDFRPWFSRVPEVTTFLDDPTFANFKTMMTKVDDGFSVIKVPFLAVKMATTSGMGMDVADWKRKGDSFYLNVITKARSTSTELTAGTNAEDVKYKVKITEKQTNDYGTALPYQPANNKHDDFLYGRKVAAGRILTPGRETAFESNALERGQSVVTGASGSTNIMVHLNDYIASKQPDFSTGQSYLNTLSFLVFDGGHSVNESLVVYQALQATDEIKRKQILNSYTANYQDLADIAGESGKVWVNQALDNAFKETQEFYQKYAVVKPQSRPAVEDLEGLSGTNKGVEPTIIGDSHLKKPVDGWQKVDVTPQTDGRETRFDGQIILQMEDDPIAARAAANLAGKHPDSSVVIQLDANGKYRVVYGDLAKLSNKLRWQVVGHGRDTSEQNNIRLSGYSADELATKLKQFYQAAKLGKQAISKPDHISLVGCSLISDNKRDGFARRFITELDKQGIRSDVSARSSEVAVDATGRKFTRDENNQWVNNSPDNKIVLSLNAENKLITHTEQVRRGIAESDIDFAKVGYTQADSVTKGEIADNTEIFIKPQKREKVNTSDNSHRQLSYSGNIQVDVGEGEFTALNWGTSNVGIKVGTGGFKSLAFGDNNVMVHIGHGDSKHSVDIGGYQALEGAQMFIGNRNVSFNQGRSNDLIVMMDKSIPTPPLVNPFDDTARIAEVLKGIARSGETQDWLAAQDQQWTIAGARKFVRDMSGLDQTSSVDYKTLLDLDSQHERSSRGLQNDAESALNKKFNQWLGENGNSIEMGKMSRADKFRQANQKLAFNFAVGGRGADIQVTTGNWNFTFGDNIQSILDTNLGSLFGLMTQQYSATGMAKTTFTYTPQDLPRQLQNKLLGRLSEVGADTTLADIFGVDYTADGRIVSRTGKPVDGEAMLKEMLEVIKEFSGDQLAAFTNPGKLLDSLEAGIKAGEDGVRTFAESHGLKEKAPDKNQEQGAVVSTNGDSAQANNKAERAFGFNSLNLPNLFATMFSKDKQAEMQSLVTNLKENLTADLLNMKQKTFDFLRNSGHLQGDGDINVSLGNYNFNWGGDGKDLGAYLGDNNNFWGGRGDDVYYSLGTSNIFTGGEGNDMGVLMGRENWMFGGDGDDTAVVAGRINHVFMGEGNDQTFVFGEGGLIDAGNGQDYVVTSGNYNRVDTGAGQDYAVTIGNNNRVDLGEGDDFARVFGNDNRIDGYSGNDTIKLMGYHAMINGGEGDDHLIAAAISKFSQFNGGDGQDLLVLGGYQNSFQGGAGVDSFVVSAEVIDNRVNDINAEDMILFNGVDWKDLWFQRSGYDLVLSVNRHTQDNTAQEIFESVGSVTFNDYFNGHRAKLVTQMGDKDKSGEYEFTALSDNAVDSLIQAMSSFSPTVGDNGFIESLGSKARAAVATAWADVTLGKGKFAZ

SEQ ID NO: 3732 - protein, 209 aa, Photorhabdus luminescens
HVFSESQSHIDYSISAYCGTHPSSNANVVSQERYEESLSLYSGFPPDNVPTHLLNKALRQSSTIASVVANFMSTQCGKDVLDNGDLATLNKTFTDSLECHANKNFPGSLSLNGYQQLPGGLILQWGRHNFTPLAINKVILPTPFKQGCLKVFMSPVGDWIFPMSAAPNGTLNTFNSWVAARTINAYGTEIKLSAGDTYVYGDYFAIGFZ

SEQ ID NO: 3733 - protein, 769 aa, Photorhabdus luminescens
MINLDINEQNKIMVVSSHVFRPTTANGRAFTELIEALKKNNFAVILAATFQDGIATVSSDSSLCCIFVDWTSGDNNYESHKQVLELLKEIRKHNTTIPVLLTAEYSSIDTLTLEVMGLADEFVWMLEDTAGFIASRASSLIKKYYAQLLPPFTRALLQYTQESPEYSWTAPGHQGGVALTKTAAGRELINFFGENLFRSDIGIERKILGSLLDHTGAIKESEEYAATIFGAHQSYCVLNGTSGSNRIIMGAVIGEKEIIICDRNCHKSIGQGLIMTGALPVYLIPQRNRYGIIGPIPRDQFQPEYIQQLIDQHPLKAIAIDNKPVYAVITNCTYDGICYHAEQAQDLLAKSVDQIHFDEAWFAYARFNPMYKHRYSMRDDPNDFDNNGPTIFATQSTHKMLAALSQSSYIHIRNGKKPIEHSRFNESYMMHSTTSPLYSLIATNEIAAAMMDGPQGQRLIQNAINEAVDFRLTLAKTHHQFKQKDDWFFLPWNAREIISADSGKLIPFHEANREQLATDPSCWVLKEGEKWHGFTNLSAEWCLLDPTKVGILCPGMNDNDELLENGIPAEILSAYLSQHDIVPARTTDFIVLCLFSIGVTKGKWGTLINVLLNFKKHYDANTSLKQCLPKLAKQYPEYYENMGLKDISDKIFGYIKEYEMDIEQKKSFSQLPEIVKLPRQAHLDHMAGRTEHLPLNELAGRISAVSVIPYPPGIPIILPGERFGDEHAPRLQYIRQLGEWNNKFPGFEKILEGAEMINGEYHIWVLKEZ

SEQ ID NO: 3734 - protein, 487 aa, Photorhabdus luminescens
RVSTWHHTALYRDNHLNNIKINYFVIIVIALFSAAIISLNISWPNKQQEQINRIITRGELRISTISSPLIHLTGKKEANGFDYELVQRFANYLGVKLEIKFRKNINQLFDDLEKGEADFLAAGLTYHQERLDQTRTGPAYYSVSQQLIYRKGTPRPRSFKDLKGKLLVASGSAHASTLKKIEKENFPELEWEETPQYNTRELLEQVSEGKLDYTLGDSINVALQQRTHPNLAVAFDVSEDNPLTWYLKRIDDYSLYAAMLDFFSQLTEKNVMPRLEEKYFGHVHSFDYFDTLSFLSAIDNILPTYQPLFEKYSGDISWKLLAAIAWQESHWDPQAISPTGVRGLMMLTNQTAKGLGVVDRLDPEESIKGGAIYLQNLMKRLPENIPKDERIWFALAAYNMGYGHMLDARKLTASQKGNPDSWLDVKKRIPLLSQKKYYTNTTYGYARGHEAYRYIENIRRYQLSLVGYLQAKENRKKLIPQENQPKZ

SEQ ID NO: 3735 - protein, 210 aa, Photorhabdus luminescens
MSLSGYNPGSSFVHRVSPGFKIISLLILGTLLFVVPRIDLSAAALAGIVLLYLLAKISLKTAWMQLRPALWIFVLIFIVQLFLHHWTAGVLVIVRLISLLLLASLVTLTTRSSDMIDALEKGLGWLYYFGINPGKVSLALSLALRFIPVLASITEEVREAQKARGLDKSVIAIAVPVIVRMLKMADDISAAIEARSYDPEFDKSKSSSKZ

SEQ ID NO: 3736 - protein, 1317 aa, Photorhabdus luminescens
MASFPLRHLLSFASKMRELITMKILRGSPALSAFRITKLLSVCQEQQLPVNDIYAEYVHFAEINASLSDVDSAKLQQLLKYGPSLAEHEPQGTLLLVTPRPGTISPWSSKATDIAHNCGLSQVVRLERGVAYYIQSGEMSDTQWQILSSLLHDRMMETVFTQLEQAEKLFSRQQPVPLKRIDILQAGRSALETANIELGLALASDEIDYLMDAFQKLGRNPTDVELYMFAQANSEHCRHKIFNADWIIDSQAQPKSLFKMIKNTYEQTPDYVLSAYKDNAAVMEGSAVGRFFASAENGSYDYHQEQAHILMKVETHNHPTAISPWPGASTGSGGEIRDEGATGRGAKPKAGLVGFSVSNLRIPGFEQPWEEDFGKPERIVSALDIMMEGPLGGAAFNNEFGRPALLGYFRTYEEKVNSHNGSELRGYHKPIMLAGGIGNIRDEHVKKGEISVGAKLIVLGGPSMNIGLGGGAASSMASGQSDADLDFASVQRDNPEMERRCQEVIDRCWQLGENNPILFIHDVGAGGLSNAMPELVSDGGRGGRFELRKILNDEPGMSPLEVWCNESQERYVLAVAPEQLPLFEEICRRERAPYAIIGEATEERHLLLNDEHFDNQPIDMPLDVLLGKTPKMLRDVTTLKASGESLERRDIDLAEAVKRIMHLPAVAEKTFLITIGDRSVTGMVSRDQMVGPWQIPVADCAVTTASLDSYYGEAMSMGERAPVALLDFAASARMAVGEALTNIASAYIQDLKRIKLSANWMSAAGHPGEDAGLYAAVKAVGEELCPALGLTIPVGKDSMSMKTRWHDQGEEREMTAPLSLVITAFARVEDVRRTVTPELSTDEDNALLLIDLGQGKNTLGGTALAQVYRLLGNKTADVRSAEQLAGFFNAIQQLIAEQKLLAYHDRSDGGLLVTLAEMAFAGHCGIEADISVFDEDILAGLFTEELGAVVQIRASDRGFVESILAEHGLADCVHYLGKAQAGDDFVIFSGNTEVYRQNRSTLRLWWAETTWQMQRLRDNPACADQEHQAKQDNQDPGLNVKLTFDISEDIAAPYILQQVRPKVAVLREQGVNSHVEMAAAFHRAGFEAIDVHMSDLLSGRIGLSQFQTLVACGGFSYGDVLGAGEGWAKSILFNERVRDQFAVFFARPDTLALGVCNGCQMMSNLRELIPGAEHWPRFVRNRSERFEARFSLVEITDSPSLFLQDMVGSRIPIAVSHGEGQVEFRNRQHLEMLESNQLVALRYVNNYGQVTENYPANPNGSVNGITAVTSLDGRATVMMPHPERVSRTVNNSWHPDEWREDGPWMRIFRNARKQLGZ

SEQ ID NO: 3737 - protein, 499 aa, Photorhabdus luminescens
MGFSISPLSVSIGVLTGYEMISLKKWRLFPRSLRQLVVMAFWLVLLPLLVLAYQAYQSLDQLSEQAADINRTTLADARRSEAMTGIALEMERSYRQYCVLGDKTLENLYQRQYQQYLKMLKDQMAILDEQQHIKTLNSLLSQLTKIACLNSEPTQPAAQLLEQFSNANSQMVQATRDIIFSRGEQLQKDIAEKGQFFGWQSLILFLLSALLVALFTRMIIGPVKGIERMINRLGEGQSLGVRIDSFQGPRELRSLAQRIIWLSERLAWLESQRHEFLRHISHELKTPLASMREGTELLADEVAGPLTADQQEVVAILDNSSKHLQQLIEQLLDYNRKLADGPTEQQQVSLREIVNEVVLSHSLPARSKNIQTEIQLDADILWAEPTLLMRVIDNLYSNAVHYGAESGNIWVSSRQIGKYVQINVANTGTPIPESERSMIFEPFYQGTLQRKGAVKGSGLGLSIAQDCIKRMGGELILIQSEFADVCFRIKLPLAAENEZ

SEQ ID NO: 3738 - protein, 283 aa, Photorhabdus luminescens
IMHNRSTYRFVRKTDRQNIAVQLGENVSVARLLLPRVSVGGFSMMLLIFVVFLLAGCVKNPVNNNLATVTQMVIPEQRVTDYRIAECGLMWDLETPPSIENALYWLRLMDCSDRLTSARARNMAKYTLPVTWDMAFKQSILLNSAGPTLSERRKMIENFNKYRLKFPNPLRALLQLWREQQVQQIAVAEERAKFQKLQADTDNKLDRLRESRARLEFELQQTSRKLENLTDIERQLSSRKQNQGSAGSGNSDKHVETPETTALPNKNSTPNSTSESDKGAAPZ

SEQ ID NO: 3739 - protein, 446 aa, Photorhabdus luminescens
MTARKPAHLLLVDDDPGLLKLLGMRLTSEGFRVTTAESGGEALRLLTKEKIDLVISDLRMDEMDGMALFAEIQKQQPGMPVIILTAHGSIPEAVAATQQGVFSFLTKPVDRDALYKAIDGALALTTPASDEQWREQIVTRSPAMLRLLEQARMVAQSDVSVLINGQSGTGKEVLAQAIHRASPRAKKPFIAINCGALPEQLLESELFGHAKGAFTGAVSSREGLFLAAQGGTLFLDEIGDMPQALQVKLLRVLQERKIRPLGSNRDLDIDVRIISATHRDLPKAMAKNEFREDLYYRLNVVNLKIPALNGRVEDIPLLANHLLRESAKRHKPFVRSFSVDAMKCLMAASWPGNVRQLVNVIEQCVALTTAPVISEALVTQALEGENTALPTFVEARNQFELNYLRKLLQMTKGNVTHAARMAGRNRTEFYKLLARHELDANDFKEZ

SEQ ID NO: 3740 - protein, 541 aa, Photorhabdus luminescens
MSRTLNIALAQLNWMIGDIEGNCERMLQTVQEQQQQNADLVMFSELAISGYSPEDLLFRADFHQRCREQLARLQAASCQIAILVGHPWEQDGEIYNALSLFWQGEILARYFKQRLPNYGVFDEKRYFKAGDQSCVVPFKGYNLGLLICEDLWFDEPIDALKQAGADLVLSINASPYSREKPYIRYELIREHCRRTELPMIYLNQVGGQDELIFDGCSKVFNASGEVTHRLAAFNEQIQQCCFNELKIEPMVNPAPELPPLQQVYQALVLSVHDYVRKNGFQGVLLGLSGGIDSGLTLAIAVDALGKEHVQAVMMPFRYTSEMSIEDAKKQADMLGVEFNVVSIEPVFDAFMAQFEPLFAGTAKDTTEENLQARCRAVILMAMSNKRHRLVLTTSNKSESAVGYSTLYGDMAGGFNALKDVPKTLVFALAKYRNTVSPAIPQRVIDRPPSAELAPGQLDQDSLPPYDILDDILEGYVEQDKSVDGLVAAGFDEQIVRKVVRLVDINEYKRRQAPVGPRITLRNFGKDRRYPITSGFGRKNWZ

SEQ ID NO: 3741 - protein, 295 aa, Photorhabdus luminescens; identical to SEQ ID NO: 1209

SEQ ID NO: 3742 - protein, 358 aa, Photorhabdus luminescens
MEVHVTDFHNFDVYLSQIMNWHFSPETGSPFWLEKRKILDFDPLQDIRTFSDLRLFPDIADELRDVPTESLVPRGLQNAAIAGVFESGGTTGRPKRVVVFEEWLEQLVAWRLSDMKVVNTGAIKNTLALVPSGPHVIGAISRLRARANGGHFFTVDLDPRWVKKMIQQGDLAGMEAYCEHILDQAEDIINRQNISYLIVTPPLLERMVRRAALVSHLNKSLDLIAWGGTHMDPDTQAFLQSSIFPDVKITASYGSTMILGESKSRDNQDFEGSPIFDSFAPNVLFEVIDPLTQKPVPFGERGRVVMNYINKFALFPNILERDTAVRMPRIDDYPGVSVTLVRPVEEISGHAVIEGVYZ

SEQ ID NO: 3743 - protein, 477 aa, Photorhabdus luminescens
GDFWSCGNRRGLLMLIDSVKPDVKTAMENKLQQVEALALGESYVTRRRAAVINVLDEVVGETAIAPPVYICEVVRKMRIAPRLRLDEIHATMKQAAKIYSSESVAGLSPAEYVQLTHRVIGLPASIIERSLIETSEVLMMMSEIIKASMPHGAIWHVDDSRVAEGCALFSRRADVLAVLTGGNGPGAHALWPQALAFGYRILIKPSVREPFTAQRLVSSLQQAGLGNYVALIPTDHQGADEMVSAADLSIIYGGQDIVNKYHSNPKVLIQGPGRSKIVVGSDVNIDEAVSLVARSVSALGGTACVSASAVLIEGDPVDFGQRLSEAFDQMDAEETFPLGSSNTTALLQKSLYPEKNEDLRLFGEQTSSGYILRPCVTVVDNPIDPLIQRELPFPCVTVAPYDRLKSSQMLSDSLVVTVFSKKPEILGAVLSNTTISNVYAGDIPTTWMAPLVPHDGYLSEFLMHSRGVRIQKNWFTZ

SEQ ID NO: 3744 - protein, 376 aa, Photorhabdus luminescens
LLMANDLNVERTGLVFTLTAGNLPVKTFVVVEFTLNEVLSMLFSLQATVTCANSDIDFADILDQYATLTVYRDGQPERYITGIVTHFVQETTGRYRSCYYLTLHPSLWRAGLRVNSRIFQNKSVTDIIDRLLKENGVRQFSCLLRYEHPVREFCVQYDESDLAFLQRLLADEGIFYYYYFDQDKGEPAMIFVDSYTKNGSLSLPYNPEPDVTGNQCCISQFRWGERVGIAEISVRDYTFKHPRWLSDFQFHENHRYIGNQRSDLNSYYYYDFPGRYKDGNGQRISQYRLEALRNDALLGSGQSDSFALLPGMWFTLTDHPKEKFNAPWQIIQITHRGHQPQADESHFGSRGTTLTNGFTFGSPNFSVRLKRFIRMZ

SEQ ID NO: 3745 - protein, 201 aa, Photorhabdus luminescens
ACFCPVKGKTGLISAVITTLALFHPIIPKADRIKLYVKEEAAGRDVLAVLDNRYVQKVNHYAFALPVLQAYGVIVSRKWPSDLPSTDDIRAYASTSVNNKLFYRPVVDLDKVRVAFTKKKEGEEFIRTTLFHLLPVRKKFTHIFVFMLIFVVAMTLWDHLGEGNVANMLLAVGAFAVGSMFVMMVPVFQVRKKYLTDESQZ

SEQ ID NO: 3746 - protein, 249 aa, Photorhabdus luminescens
RVKLIIKYQESNFKASEKRSSNMDNKLIISPQVINTMKQSNEPWGIKDKNSCFIYGNKALKHLENLPDSFDYEGWYDYELPWSGAEFAKEFVLHDQSVMKSETTVCSLETHMYGNDKFLSSHFCEKYPLYNNENECVGVIFHGWEVQDFSLTRLFYGKLPASIIFQPPTDLFTPREWDVVFLSLHKYTSKQIGRILNISYRTVEHYTAQIYRKVGVRSAQQLEEYCRFNNYDLYVPERFLRPESSILVZ

SEQ ID NO: 3747 - protein, 225 aa, Photorhabdus luminescens
MLEIRNVTYAYGERVILQELNLQLKEKRIAIIGSNGCGKSTFARLLNGLLVPKNGDVLVDGLNTRTEGKAIRRKVGFVFQNPDNQIVFPVVEEDLAFGMKNLGFSKDTIRQRTQEALSRYDLLQFREHPAHLLSGGQKQLLAISGVLVMEPDYIIFDEPTTLLDLRNKRRVAAAIDNLSQTVIVVSHDLDFLAGFDRVLVFDDGRVVVDDIPSIAIPEYVRMMLZ

SEQ ID NO: 3748 - protein, 367 aa, Photorhabdus luminescens
KGKIMKPVTNNNFLRKINIKGYKSISECDLQMGCLNVLIGANGAGKSNFISFFRLITVVLDHHLQSLVGKMGGPDTLLHFGRKKTESMSTELYFDHNGYKFELEPTNDNRMMFQHESLFLDIKGDFNIGAGHFESQIGQHHNIEDYALLTMLRWRVYHFHDTSDNARVKQTHRINDNDYLREDGANLAAFLYRLQKNHILHYKRIVKTVQMVAPFFGDFYLRPTPDNTDYIQLEWTEKEQDIPFKASELSDGTLRFILLTTVLLQPEDYMPSSIIIDEPELGLHPYAINVLAGLIKNASSKHQLIISTQSVELVNQFDADDLIIVDKQQGESTFKRLNSDFLSEWLEDYSLGELWKKNLLGGRPQRZ

SEQ ID NO: 3749 - protein, 230 aa, Photorhabdus luminescens
IMEEKFTRREATAMIRINVFVEGQTEETFVRDVLAPYFVAQQIYLTPILVQTSTSQKGGITSYGKVKYQITRLCRQDPGAFVTTLIDYYGLPTDFPDYNEQQDNAANERVVKLEQAFANDIGQTNFIPNLLLHEFEALLFCQPEKFADWLDDNAPISVLQTIKAQFDSPEDINNSPQTAPSKRILAIVPNYHKTLHGPLIAGDIGLDTIRSQCPHFNQWLNKLTNLSFVZ

SEQ ID NO: 3750 - protein, 356 aa, Photorhabdus luminescens
RCLILSEMEIIILAMKIFITDEQKAELEHLHHTCRDKRECDRIKAVLLASEGWSSVMIAQALRLHEMTVNRHISDYLNQGKLKSDNGGSDSLLSREQTDFLINHLSQHLFHHTHEIVAYVAQLWNITFSIPGMNKWLHRQGFSYKKPCGVPHKFDAEKQRQFIEYYENLKVTAKDEPILFLDAVHPTQGTKLSYGWMRKGEKKTVKTTGSRTRLNILGALNLNAIGRTVFQEYQTINDYNICCFFNEIRKSYPDYHQKIHLIVDGAGYNKAHLVKEWAYVSNIELHYLPPYSPNLNPIERLWKVMNEQVRNNRYFADKHEFRDNVFKFFTTTLPDIADSLMSRINDHFQVLKTASZ

SEQ ID NO: 3751 - protein, 194 aa, Photorhabdus luminescens
MSRVFAYCRVSTLEQTTENQRREIEAAGFAIRPQRLIEEQISGSVAASERPGFARLLDRMENGDVLIVTKLDRLGRNAMDVRKTVELLAKSDIRVHCLALGGVDLTSPAGKMTMQVISAVAEFERDLLLERTHSGIARAKVAGKRFGRPPALNEEQQQAVIIRLKAGDSISAVARQFSTARQTIHRIKAGMILZ

SEQ ID NO: 3752 - protein, 479 aa, Photorhabdus luminescens
FALVFHTACPTRSFMVSLTKKQTAQLSEMGHDVLLNIIHDLIQDNKQARNALVNGYLLSAAEVLKAVEKEYVRRAKSKRFYDYYDADAFFDELTRSIATPLVGIAHALPEQVESLSVKMMLEFEKFTGNVDTSSGSWMDYYTILLDAWMKSLGAQKNNDPAFIAKKIFTVVEREFYFGIEIFKKYRALLGTDILRIIRDMYYQKKLHREALGLSMIMKDLDFLTMAFKNDEFCHSTHYFDYARLLMEELRSDDALAVLKSQRNDDEDITDNIIWNELFIQALIEEGRKEEAKAHCITAFTFQGDTRFYHLYTKAAEKDVDHSPAFLKIAKDTGLAPYVCFASDIERYDLIDACIMGTPKNNLADSLAYITHSYLRTLSSTLYKHGYAHTATLLRRFLVEDNIQKSKSKYYSYAASDMKKAIDYGEGLEDCPQLPETEGYLRTLYEQHKRKTALWPLMTDKIKGLSVGKDGLRYSGDASZ

SEQ ID NO: 3753 - protein, 397 aa, Photorhabdus luminescens
MLDNQTIATVKSTIPLLSATGPKLTAHFYERMFKHNPELKNIFNMSHQLNGDQREALFNAICAYAANIDNLKVLLPAVEKIAHKHASLNIQPEHYQIVGTHLLATLNEMFQPGNEILDAWGKAYGVLADIFINREEQIYHSGELTDGGWRGLRPFRINRKEVKSEVICSFEFAPQDGGKVMDYKPGQYLSIYLQDDSFANREIRQYSLTAAPNGSSYRIAIKREPQGIVSNHMHDKMQEGDTVWLTAPRGDFFLDIKPETPVTLISAGVGLTPMMSMLYHLHQQNHNSPINWLHAAEHGGHHAFSHEVAAIAQAMPNFAGTIWYREPRDEDQQGIHYQHKGFMDLTVLNEALKTEGMHFYFCGPVAFMQYVAKQLLDMGIDKQFIHYECFGPHKVIZ

SEQ ID NO: 3754 - protein, 418 aa, Photorhabdus luminescens
MLKREMNIASYDPELWQAMEQEVVRQEEHIELIASENYTSPRVMQAQGSQLTNKYAEGYPGKRYYGGCEYVDVVEQLAIDRAKALFGADYANVQPHSGSQANAAVYMALLQPGDTILGMNLAHGGHLTHGSPVNFSGKLYNVVPYGIDESGKIDYDDIAAQAEKHQPKMIIGGFSAYSGVVDWAKMREIADSIGAYLFVDMAHVAGLIAAGVYPNPVPHAHIVTTTTHKTLAGPRGGLILAKGGDEELYKKLNSSVFPGCQGGPLMHVIAGKAVALKEAMEPEFKAYQHQVADNAKAMVEVFLARGYKVVSGSTENHLFLLDLVDKNITGKDADAALGRANITVNKNSVPNDPKSPFVTSGVRIGTPAITRRGFKQAEARELAGWMCDVLDNINDEVTIEMIKQKVLAICAKYPVYAZ

SEQ ID NO: 3755 - protein, 382 aa, Photorhabdus luminescens
MVIRSTRWLALDYFTYFFSYGIFLPFWAIWLQGEGIEHDMIGVLLGAGLISRFLGSLLIAPTVKDPAKLIFALRISALITFVFIVGFTLGNHWAWLLFVMVGFNLFFSPMMPLSDALAGTWQKQFPFDYGKIRVWGSIAFIISSALTGELISVWGHRAILITILFSVFSTLLVTLLRPSIMPVGETKSAKVDVVSFKQLLSEKSVRRFLLCVALLQGAHAGYYSFSAIYWENAGYSASVVGYLWSLGVVAEVIIFTLSNQLFRRWSARNLLLLSGICGVVRWGLMGTYTSLPVLIIVQILHCGTFTVCHLAAMRFIGARKEGEIVRLQAAYSALAMGGGIAVMTVIAGFMYDYLHSGIFWMMALVAFPAIFLRPQVKAHNYZ

SEQ ID NO: 3756 - protein, 316 aa, Photorhabdus luminescens
MSNKLTIKDIARLANVSKSTVSRVLNNENSVSPQVRERVETIIQQNNFIPSKSARAMRVKSDKIIALIVSRLGSFSENLSISAMLPLFYQHGYDPIIMESNFDPQLLQEHLRQLALRHADGIILFGFTGLSEESLFPWRDKMVVFAREYTGFSSVCYDDIGAVRLLMNEFYRRGHREISFLGVDDCDTTTGFLRHQSYLACCEQQGLRPLSVQCDLSYQSGFQHINKVLREKTTALICATDSLALGAYKYLQQNSREDIQIGSIGNTPLLNFLYPNTVSIDLGYSEAGKYASDQLISQINRQYFKQKVIIPSKLAZ

SEQ ID NO: 3757 - protein, 477 aa, Photorhabdus luminescens
LAIMKNKINSKDIEKLITLIGGCENIASVTHCITRLRFILVEPVKAKPDEIKNLSMVKGCFTNAGQFQVVIGTNVGDYYQVLNRYLDQSELNKKDKQQVEKKNMKWQERFISKFAEIFFPLLPALISGGLILGFRNIIGDIPFSEGKTLAQIYPIWKTIYDFLWLLGEAIFFYLPVGICWSAVRMMGGTPILGIILGVTLVSPQLMNAYHIGQQIPDIWNFGLFTIGKVGYQAQVIPSLLAGITLGWIEVQLKRVVPSYLYLVIVPVVSLILATFLAHSLIGPFGRLLGDGVAWVVKALMTGSFAPIGAALFGFFYAPLVITGIHQTTLAIDMQMVQSIGGTPIWPIIALSNIAQGSAVVGIILVSKKHNERELSVPAAISAYLGVTEPAMYGINIKYRFPMLCAMIGSGLAGLICGLSGVLANGIGVGGLPGILSIKPQFWLIYALAMFVAIIVPLILTTVVYRRKNMAGMLAVEZ

SEQ ID NO: 3758 - protein, 214 aa, Photorhabdus luminescens
MARKTKQQAEETRQQIIDAAIKEFSERGVSATSLTDIATTAGVTRGAIYWHFKNKVDLFSEACRITDSKIDELEKEYQAKYPNNPLLILRTLIIHILTSVVDDPKNRLLMEIFFHKCEFVGEMSALVEVRQELCVADYVRIEESLSGCIASGQLPYNLHLRRAAIMLRGLITGLLENWLFAPDSFDIQKEAESLVDSFIDMLKYSEHMKIAEKZ

SEQ ID NO: 3759 - protein, 557 aa, Photorhabdus luminescens
VFLMDKIIPWWLQGVIYQIYPKSFQDTTGSGTGDLNGITYRLDYLKKLGVDAIWVTPFYLSPQVDNGYDVADYYAIDPAYGSMDDFKRLVDEAHQRDIRIIVDIVFNHTSTQHPWFKQAQDIDSPYRQYYIWRDGVPGTPPNNWLSKFGGNAWAWHEASQQYYLHLFAVEQADLNWEHEPVRAELKKICEFWAGLGVDGFRLDVINLVSKQQDFPESTQGDGRQFYTDGPRIHEFLQEMNREVFQPAGVMTVGEMSSTSLEHCHRYSSLDGEELSMVFAFHHLKVDYPNGEKWVAAPPDFIELKKIFAKWQQGMYERAWNALFWCNHDQPRIVSRFGGEGVWRVPSAKMLAMVLHGMQGTPYIYQGEELGMTNPHFSHIEEYRDIESLNIYQEKIEQGNDKQQILSVLAKKSRDNGRTPMQWDTTANAGFTQGEPWIALNSDYQDVNAENAMQDDDSVFHCYARLIKLRKEYPVLTYGSYEDLLPSHPSLWCYVRRWENQTLLVIANLSVEVQKWSLDASLSDCSWVKLMGNYPENHVPAKDMQLQPYEAVYWLAEZ

SEQ ID NO: 3760 - protein, 268 aa, Photorhabdus luminescens
MHPMLTIAIRAARKAGNLIAKNYETPDAVEASQKGSNDFVTNVDKAAEALIIDVIRKSYPKHSIITEESGELLGEEADIQWVIDPLDGTTNFIKRLPHFAVSIAVRIKGRTEVAVVYDPMRNELFTTTRGQGAQLNGYRLRGTNARDLDGTILATGFPFKAKHHSTVFINTLGKLFVRCADFRRTGSAALDLAYVAAGRVDGYFEIGLKPWDFMGGELLVRESGGIVTDFVGGHNYIHSGNIVAGNPRVVKDILAEMRDELSEALKRZ

SEQ ID NO: 3761 - protein, 242 aa, Photorhabdus luminescens
MLENIRIILVETSHTGNMGSTARAMKTMGLTNLYLVNPLVQPDSHAIALSAGASDVIGHATIVDSLDKALAGCGLVIGTSARSRTLSWPMVEPRECGERSVQQAEHASVAIVFGRERVGLTNEELQKCHYHLNIPTNPEYGSLNLAMAVQLVSYEIRMAYLARQDKTEQKTDEVEYPLADDMERFYHHLECVLNDSGFIRKAHPGQIMNRLRRLFTRARPEMQELNILRGILSSVEKWAKKZ

SEQ ID NO: 3762 - protein, 405 aa, Photorhabdus luminescens
MKLPIYLDYSATTPVDPRVAEKMMNYLTRDGIFGNPASRSHRFGWQAEEAVDIARNQIADLVGADPREIVFTSGATESDNLAIKGAANFYQKKGKHIITSKTEHKAVLDTCRQLEREGFEVTYLAPQSNGLIDLNDLEAAVRDDTILISIMHVNNEIGVVQDIAAIGEMCRSRGIVFHVDATQSVGKLPIDLTKLKVDLMSFSAHKIYGPMGIGALYVRRKPRIRIEAQQHGGGHERGMRSGTLPVHQIVGMGEAYRIAKQEMESESQRLRGLRLRLWQGIKDIEEVFLNGDLEHGAPHILNVSFNYVEGESLMMSLKDLAVSSGSACTSASLEPSYVLRALGMNDELAHSSIRFSLGRFTTEEEIDYAIELIHKSIGRLRELSPLWEMFRQGVDLNSIEWSHHZ

SEQ ID NO: 3763 - protein, 617 aa, Photorhabdus luminescens
MALLQISEPGLSAAPHQRRLAVGIDLGTTHSLVATVRSGQAETLMDSEERYLLPSVVRYHEKGPEIGWLARQQAAYDPANTISSVKRMMGRSLADIQQRYPNLPYQFQASENGLPLINTATGLVDPIQVSSDILKSLVQRAEETLDGKLDGVVITVPAYFDDAQRQGTKDAARLAGLHVLRLLNEPTAAAIAYGLDSGQEGVIAVYDLGGGTFDVSILRLSRGVFEVLATGGDTALGGDDFDLILADWIREQAGIGSRDDHSLQRQLLDMATQVKIALSDADIAEINIAGWQGKITRCEFEALITPLIKRTLLASRRALKDAEVSADEVLQVVMVGGSTRVPLVRHRVGEFFGREPLTSIDPDKVVAVGASIQADILVGNKPDSDMLLLDVIPLSLGLETMGGLVEKIIPRNTTIPVAKAQEFTTFKDGQSAMSIHVVQGERELVSDCRSLARFTLRGIPPLPAGGAHIRVTFQVDADGLLNVSALEKSTGVEAFIQVKPSYGLSDEEIARMIKDSMANAQEDINARQLAEQKVEAARVLESVTSALEKDADLLNEQEQAAIDAAVETLITSVQGNDPEIIENAIKQLDKQTQEFAARRMDSSIRRALAGHSVDEIZ

SEQ ID NO: 3764 - protein, 432 aa, Photorhabdus luminescens
MTKQIMPITLSYEPAAACWGEKALISSSEQGVMVHLVGKGKLGAVQRAGRKIDGQGIRHVALVGEGWDLEKSWAFWQGFRAPKGNRSIEWPQLPAAEKQELESRIKIIDWVRDTINMSAEELGPEQLAKRAIDLMCGMACESVSYRIIKGEDLREQGYTGIHTVGRGSSRDPILLALDYNPTGNPQAPVFACLVGKGVTFDTGGYSLKQSSFMDSMKSDMGGAATLTGALALAISRGLKQRVKLFLCIADNMVSGNAFKLGDVIHYRNGKSVEVMNTDAEGRLVLADGLIDASKEKAKLIIDAATLTGAAKTAVGNDYHSVLSFDDKLADDLLTAAASENELFWRLPLAEFHRSQLPSNFADLNNVAASPHTAGASTAAAFLSHFVEEYQKGWIHIDCSATYRKSAVEHWSAGATGYGVRSIANLLLAKAKZ

SEQ ID NO: 3765 - protein, 602 aa, Photorhabdus luminescens
LITMKLSKIYSNKPSLFEPIAFHEGLNVIYGEIRLPENKEKDTHNLGKSTLGRVIDFALLSRRNTDFFLFKHPDIFNQFVFFLEIELKDSSFLTIRRDVAQPSKICFKKHQEKNQDYSLLPTDQWDHEDVSFDKAKELLDSLLDLSVIKPWSYRNSLGYLIRSQDDYSDVFQLRKFRSKDASWKPYLSHILGFNAELIKEHYKKEKALEEKQTTEKAVKKELGGSLEDISKVEGILLLKKKDAEKKQELLDAFDFRQQDKEKTKVLVEEIDEEIASLNQERYSLNQNRKKILKSLEEDKVLFNTEEAEKLFNEAGVLFSGQIKKDFEQLLGFNKAITEERFGYLTEEKSEIEAKLRIINTRLNELGTRRSKSLSFLSDTEVFSKYKILSRELVSLRADIETLERQKAHLHKLQELRTEIRSLSEECSHLQSKIENNVESQNSDQASIFSQIRLYFSEIVDTVISRKALLSVSPNREGHLQFKAEILDESGNATSADLGHTYRKLLCIAFDLAVLRVHKGEKFPHFAFHDGVFESLDNRKKENLLAILRDYVELGIQSVITLIDSDLPTRSPKELPVFDSTEIVLQLHDEGESGRLFKLKTWZ

SEQ ID NO: 3766 - protein, 201 aa, Photorhabdus luminescens
LIVFLCQELHGIAVQGFSKGPDGGRDAKFIGTSALYPSISAPWSGTIIIQAKHTNGYNKLFSESDFYNPDGNSSVLSKEIVRIKKLRNAKQLDHYMLFSNRRLAGNAESEIRSYLAKKCDIPESSICLCGIELLETWLKSFPKVAGRAALDPVDSPLIVSPDALSDVVYALAAQQKKVYLRKTIHQPPEYPIVRKTKLTTZ

SEQ ID NO: 3767 - protein, 338 aa, Photorhabdus luminescens; identical to SEQ ID NO: 778

SEQ ID NO: 3768 - protein, 549 aa, Photorhabdus luminescens; identical to SEQ ID NO: 1121

SEQ ID NO: 3769 - protein, 398 aa, Photorhabdus luminescens
MRINRGVLPLATVLVLSGSLALSGCNDKDSQQVAGNQQAPEVGIVTLKTEPLMVTTELPGRTSAFRIAEVRPQVSGIILKRNYKEGSDVKAGASLYQIDPATYQAAYDSAKADLAKAQAHAEITRLTANRYKSLLGTNYVSQQEFDKASADYAQADAIVQAAKAVVETNRINLAYTKVTAPISGRSGKSTITEGALVSVGQPTALTTVQQLDPIYVDVTQSSDDYLRLKNEIAKGIVQKEDNKAKVHLIMENGKNYSETGYLEFSDITVDETTGSITIRAIFPNPNEELLPGMFVRAKLEEGIRQDSILVPQQGVTRTPRGEATVMVVGADEKVEPRVITTNQAIGDKWLVASGLKAGDRVIVTGLQKIKPGIPVKAEEVDLNAKPAANQAEPAKKSZ

SEQ ID NO: 3770 - protein, 356 aa, Photorhabdus luminescens; identical to SEQ ID NO: 52

SEQ ID NO: 3771 - protein, 339 aa, Photorhabdus luminescens
SPFRIKSSIFNDYGYNAESGTFLKNDIGVNGYGRHTFTHEIGHTLGLDHPADYDASDKVVPTYKNKATYFEDSGAYTIMGYFSEKNTGQDFKGIDSSAPLLNDISAIQALYGANNTTRTDDTVYGFNSNTDRDFFTAKDAKSKLVFTAWDAGGNDTFDFSGFTQDQRINLNEASFSDVGGLKGNISIARGVTIENAIGGSGNDILIGNDANNTLKGGTGDDIIYGGLGADHLWGGEGKDTFVYLNAEESSFLERDWIHDFVSGEDKIDLSLFDLGAAGKGTIKFVEEFTGAIGEAVISYDSVNKVNDFVINMGGELSQDGFGVKIVGEPLIEADFILSZ

SEQ ID NO: 3772 - protein, 5217 aa, Photorhabdus luminescens
MKDSMAKKEIIFDAGLVQVLSNKVGDDISVQKLNLLSEAERTLLLETWNATETVYPDQLGIHQLFERQVEKTPTATALIAGDKTLSYAELNACANRLTHQLIKQGIGPNDHVAILLERSIELVVAQLAILKAGAVYVPIDTSVPDERKKWLINDGFAKLLLTGAQANIPANLDIPLIRLSDETDADKAEESFNPDLLYSGTAPAYIMYTSGSTGTPKGVIVPHRAVVRLVINNGYVEIEPNDRVAFAANPAFDASTFEVWAPLLNGGALVVIDHTTLLTPPEFVQELDRYQINILWLSVGLFNRLAAELSPVLPQLKNLIVGGDILDPYVISQVLRNNPPQQLLNAYGPTEGTTFTTTYRIETLPTGVTNIPIGRPIANTRVYLLDEQGQPVPLGRMGEIYVGGDGVACGYLNRPELTAERFLVDPFSDVPDARMYRTGDLARYLPDGNLEFLGRNDQQVKIRGFRIEPGEIEARLVEYSTVREAVVLALGEGQDKQLVAYVLAESDNELPTHLREHLSARLPDYMVPVAFVRLDEFPLTPNGKLDRRALPAPGENAFARQVYAAPQGEREIALATIWRELLGIEQISRYDSFFALGGHSLLGVRMIEQLRHLGLTLSARDLFQSPILAELAQTLGQHQIVTVPPNVITPATTALTPEMLPLIDLTQPEIDHIVEQVPGGGANIQDIYALSPLQDGILFHHLLAKEGDPYLLAYPMIFADRGLLDRYLFAVQQVVDRHDILRTAFIWQGLSVPAQVVWRQAPLSVTELTLNSADGPVGDQLAQRFDPRQYRLDLSQAPLLRFVIAQEEDGRWYVLQLQHHLIGDHTTLEVMNLEVRAYLDEQDDNLPTPVPFRNLVAQARQGVDQTEHHRFFTDMLAEVDEPTLPFGLTEVHRDGSQVTQAHRMLSPLLNDRLRAQARRMGVSLATLCHLAWAQVLSRTSGQEKVVFGTVLFGRMAAGEGADSGMGLFINTLPLRLDIDDTSVHNSVRMAHTRLAGLLDYEHASLALAQRCSGVQGGTPLFSALLNYRHNEQPMIPHEVMPGIEFLGEQERTNYPFVLSVEDGGDTLGLTAQVVQPFDSERVCGYMQQALESLADTLEQAPETPVRALNVLPASERTLLLETWNATETPYPEQRCIHQLIEQQAEKTPEAEALVYENQTLSYGQLNISANRLAHQLIALGVVPEQRVAICMASSPARVIAVLAVLKAGGTYVPLDPAYPGERLSHILTDAVPAEGVKTIGLKAMGVKAIVLADSTGQAALGEQMLAGLTVLDPNILPDQPDNNPQVSALTSRHLAYVIYTSGSTGIPKGVMIEHRGLVNLIRDKIIQFDIRPVSRMLQFASFGFDAGVWEIMMALGSGACLVIPAETVRQDPSRLWHYLEEQSVTHACLTPALLREGADLPTITIKPTLILGGEAPSPVLLRALSHQAILFNAYGPTEITVCATSWRCPSHYTDVLVPIGRPTANTRIYLLDNHGQPVPLGAVGELYIGGDGVARGYLNRPDLTDERFLADPFSDAADARMYRTGDLVRYLPDGNLVFVGRNDQQIKIRGFRIEPGEIEARLAEHPVVREARVVALGDGQDKRLVAYVVAEADSGLAASLHTHLSAMLPDYMVPAAFVRLATFPLTPNGKLDHQALPAPGEDAFARQIYVAPQGDMEIAVAAIWCELLGIEQIGRHDNFFALGGHSLLAVRMMNRIAAFSVDLPLAALFVSPSLATFTEKICAQICAQRNTGSDKLPEIRSISRDSVLPLSFGQQRLWFLAQFEGVSDTYHIPTALRLRGRLNFSAWQQALNRLFARHEALRSVFITVDGQPQVELLPAEFGLPVKKYDLRKASNVDKQFKRLCVQEAKTPFDLARGPLIRCALIQLADEEHIFLLTQHHIISDAWSLKILESELVALYAAGLNQQPDPLLPLTIQYPDYAAWQRQVFSGEGVQAQSDYWRRTLADAPVLLELPIDRPRPSQQSFTGGRVAVHIDAPLVQALKHLGQQHGATLFMTLLTAWAALLSRLSGQDDVVIGIPSANRNLREIEPLLGFFVNTLALRIDLSDMPDVATLLRRVRQTTLGAQEHQDLPFEQVVEIVQPPRRPEHTPLFQVMFAWQESETEEWQLPELAVTPFELGYDIAKFDLQLELTEKAGEIVGELNYSSALFDHETIERQVGYLQAILWAIVNQPQQPVTAIDILSSSERELLLENWNATEEPYPTQVCVHQLFEQQIEKTPDAIAVIYENQTLSYAELNARANRLAHQLIALGVAPDQRVAICVTRSLARIIGLLAVLKAGGAYVPLDPAYPGERLAYMLTDATPVILMADNVGRAALSEDILATLTVLDPNTLLEQPDHNPQVSGLTPQHLAYVIYTSGSTGRPKGVMIEHRSVVNLTLTQITQFDVCATSRMLQFASFGFDASVWEIMMALSCGAMLVIPTETVRQDPQRLWRYLEEQAITHACLTPAMFHDGTDLPAIAIKPTLIFAGEAPSPALFQALCSRADLFNAYGPTEITVCATTWDCPADYTGGVIPIGSPVANKRLYLLDEHRQPVPLGTVGELYIGGVGVARGYLNRPELTAERFLNDPFSDETNARMYRAGDLARYLPDGNLVFVGRNDQQVKIRGFRIEPGEIEARLVEHSEVSEALVLALGDGQDKRLVAYVVALADDGLATKLREHLSDILPDYMIPAAFVRLDAFPLTPNGKLDRRSLPAPGEDAFARQAYQAPQGEIEIALATIWRELLNVEQVGRHDSFFALGGHSLLAVRMIERLRRIGLGLSVQTLFQHPTLSVLAQSLVPHREISVPDNGITADTTVLTPAMLPLIDLTQAEIDRIVEQVPGGIANIQDIYALSPLQDGILFHHLLANEGDPYLLITQQAFADRPLLNRYLAAVQQVVDRHDILRTAFIWEGLSVPAQVICRQAPLSVTELTLNPADGAISNQLAQRFDPRRHRIDLNQAPLLRFVVAQESDGRWILLQLLHHLIGDHTTLEVMNSEVQACLLGQMDSLPAPVPFRHLVAQARQGVSQAEHTRFFTDMLAEVDEPTLLFGLAEAHHDGSQVTESHRMLTAGLNERLRGQARRLGVSVAALCHLAWAQVLSRTSGQTQVVFGTVLFGRMQAGEGSDSGMGLFINTLPLRLDIDNTPVRDSVRAAHSRLAGLLEHEHASLALAQRCSGVESGTPLFNALLNYRHNTQPVTPDEIVSGIEFLGAQERTNYPFVLSVEDSGSDLGLTAQVVQPFDPERICGYMQQALASLVQALEQASDMPVQQLDILPATERTLLLKTWNATETAYPERLCIHQLFEQQVEKTPDATALIHENQSLSYVELNADANRLAHQLIALGVAPDQRVAICVASSPARIVALLAVLKAGGAYVPLDPAYPGERLAHILTDAEPIILLADSVGRSALGEQMLVGQTVIDPHSLPDQPDNNPQLSTLTSRHLAYVIYTSGSTGTPKGVMVEHRGLVNLIQDKIARFDICPASRMLQFASFGFDAGVWEMMMALCGGGALVIPDESVRQDPQRLWHYLQEQSVTHACLTPALLRDGADLPVITVKPTLILGGEAPSVALLKALRTKATVFNAYGPTEITVCATSWRCPPNYTDVLYTDVLVPIGHPTANTCLYLLDALGQPVPLGAVGELYIGGVGVARGYLNRPELTDERFLADPFSHIADARMYRTGDLVRYLPDGNLVFVGRNDQQIKIRGFRIEPGEIEARLTEYSGVREARVLALGDGQDKRLVAYVAAEADDGLVNRLREHLSGLLPDYMVPAAFVRLDAFPLTPNGKLDRRALPAPGEDAFARQIYAAPQGETETALAAIWRELLGVEQISRYDSFFALGGHSLLAVRMVERLRHLGLTLAVRDLFQSPILSELAQTLRLNQTEKVPANVITPATTVLTPEMLPLIDLTQLEIDRIVEQVPGGIANIQDIYALSPLQDGILFHHLLADEGDPYLLAGQMAFADRPLLDRYLAAVQQVINRHDILRTAFIWQGLSVPAQVVCRQAPLSVTELTLDVADGPISDQLAQRFNPRQYRLDLGQAPLLRFVVAQESDSRWIVLQLMHHLIGDHTALDVMSNEVQTYLDGQGGNLPAPAPFRNLVAQSRLGMSQAEHTRFFTEMLAEVDEPTLPFGLAEVRHDGSQMTESHRMLTPELNSSLRGQARRLGVSLAALCHLAWAQVLSRTSGQQQVVFGTVLFGRMAAGEGAENGMGLFINTLPLRLDVDDTPVRESVQVAHHRLAGLLEHEYASLALAQRCSGVQGGTPLFSTLLNYRHNIASVESNEIMSGVEFLGAQERTNYPFTLSVEDFGDALGLTAQIAQPFDAERVCGYMQQALESLVGALEHAPETPVQRLEILPAVERKLLLKVGNGPQTAYPGSLCIHHLFEQQVAKNSEATALVYEEQALSYAELNACANRLAHQLIELGVEPDQRVAICVTRSPSRVVALLAVLKAGGAYVPLDPAYPGDRLAYMLTDAAPSVVLADNVGRTALGEQALTALTVLDPNVLPDQPDNNPYIPALTSRHLAYVIYTSGSTGTPKGVMVEHHGLVNLIWEKITQFDIHSDSRMLQFASFGFDASVWEIMMALCGGATLDIPVDSVRQDPLRLWRYLEERRVTHACLTPALLRDGADLPAITIKPTLILGGEAPSAALLQALRGRATLFNAYGPTEITVCATCWRCPPDYTDMLIPIGRPTANTSIYLLDNQGQPVPFGAVGELYIGGTGVARGYLNRSDLTTERFLTDLFSDQPDARMYRTGDLARYLPDGNLLFVGRNDQQIKIRGFRIEPGEIEARLMEYSDVREAIVLALGDGQDKRLVAYVAVLEDNELASQLHRHLRALLPDYMVPSAFVRLDAFPLTPNGKLDHRALPVPDQNAFARQIYEAPQGETEIALAAVWRELLGVERIGRHDNFFTLGGHSLLAMRMINLAAERGLICSLNNLFQFPVLAELVAEITSDSLSQSQSSAIPVRPDGTEPPLFFVPSGMDDYSYVFGLAQHIQADYPIYALPWPSINEEQTSTIEALATRMITFVKAVQSEGPYRIYGYSSGGILAYAIAQQLLHAGETVNFLGLIDTPAPHCFKTRVDQPKLQFLAELARQSVDEHPQEIAALHQKMDELNLVQFIAAAQELELYPSNLRPDLIAKRWLQMGNYVQMVKDYQPKALAITLHQFYAMESYPQIPFVTDVALQSVTMEPSLGWEQIVPDSSLQLTSVPGDHFSLMEDSENKTILAKTLSMALAMNCEAEALZ

SEQ ID NO: 3773 - protein, 509 aa, Photorhabdus luminescens
MTEQQTAAAAITTHAEGSVYQSLFKKINLQPVEQLSDIDRFQSSDALADVTVDERVTAAVSVFLSVLKTSAQRVKRLDKALLDNHIRELDEQISRQLDVVMHHPEFQQVESAWRGLKFLVDRTDFRQNVRIEVLDVTKEDLRQDFDDAPEIVQSGFYHHTYIQEYDTPGGEPIGSVIANYEFDAGTQDIALLRNIAKVSAAAHMPFIAAAGPAFFGKQTMDEVAAIKDIGNYFDRAEYIKWQAFRDSDDARYIGLTLPRVLGRLPYGPDTVPVRTFNYVEEVTGPDHDKYLWANAAFAFGANMIKSFVSNGWCVQIRGPKAGGAVTDLPIHLYDLGTGNQVKIPSEVMIPETREFEFANLGFIPLSYYKNRDYACFFSANSAQKPALYDTDEATANSRINARLPYIFLLSRISHYLKLIQRENIGTTKDRRLLEIELNNWINTLVTEMTDPSDDLQASHPLREAHVIVEDIDDNPGFFRVKLYAVPHFQVEGLDVNLSLVSQMPKSKGZ

SEQ ID NO: 3774 - protein, 453 aa, Photorhabdus luminescens
GSIMKIERPLWVTGTILSPQQFQQQARWEAYANESIARLGLAHPWGVLTAVFDQHTLALGQLKADHLCVRFADGSLIDTDQADRLPPVLELAAVLPTDAQQVTVLLALPYTYANGGNCLKPDERADRPVRYQQEWVPVQDEFSDRSESMAVARYAISLRFDSMENGQYLTCPVARLLRDAQGKWIFDEQFVPPLLRLSAHAGSIARLDQLLTQLRAKQARLMAMRRESNERMADFAVADVSLFWLLNALNSYEPILSDFKAHPDVHPELFYREAVRLAGSLLTFSLDHNASVIPRYQHDNLTAVFPPLFDLLRQLLEISLPSRMVTIELKKPSEQQWIATLHDARLCEAADFYLSVRSSIPAHQLYTRFPLLCKAGAPDEVDRMISRSLTGIPLVALSHVPAAIPLRLENQYFALDLTHPAGKAMLAAGSCAFYVPGVLGDIQLELFAVLRTZ

SEQ ID NO: 3775 - protein, 502 aa, Photorhabdus luminescens; identical to SEQ ID NO: 71

SEQ ID NO: 3776 - protein, 646 aa, Photorhabdus luminescens
TTGDSLESTGRTFRHGSAITGVNQCAIVPSQATLHRRPTSRGDLWDGHRVVRCLVGVRSLSGNAISGVGEMSVMLRRVLWGWGAGLALLLCLVWLPLSPVGRWVGAVIILLCTLMGLFYRGRSQRRERLNSLSAVLPPESNRLPVVLVYSDIQDSLFGNELLRQTPQGYWLCLPTGTSLSDAIVSLLAARPSWGGQLSVMAVINPQQYRDAAVLAGWVRELRWQLSQARQRHAIPLPLLLAGYVAGPSRQPDDSPWFEWQSGRTTVTAWREGASFQPLADWLEQGTLAEQMARFQCGVELTGWADWMKAHVLPVCLTPEDGLSPCPPLAMVLKFVPALPHWVTGHVWQQWLQTKTALNRAGDPIATSATATLPFPDSVVRLLPTSALQTALQRAVGIALGLFLLAGITALGCSAWHNRQLLRQVESDLLHYRSIAATDESRKAQAVAVLRDDADRLEKYHRDGVPWRLGLGLYQGARLPPPLHAAIAGYHAKPREKTPVTPGEPQTISLNSLALFDVGQAKLKAGSTKVLVNALINIRAKPGWMILIAGHTDSTGDATKNQVLSLARAEAVRDWMLQTSDISPACFTVQGKGATSPIATNTTAAGRAANRRVEIRLIPHVAACARPQKVPDTLSTTSPLPATSLKZ

SEQ ID NO: 3777 - protein, 847 aa, Photorhabdus luminescens
SGENMTNLTPMIIFDHSRYRLKVWRNKAPLDVLAFTGQEALSQPFRYAIEFTSAEKGIEPAQMLMQQASFTLTSPAINPGIRWMPVVPPEPLRSVYGVISGFKLLSTSRDESRYEVTLEPRLALLARSHQYAIYQKLSVPEIVEKILRERHGFRGQDFLFSLAYSYPRREQVMQYGEDDLRFIQRLLAEVGIWYKVTADDRLKIDVVEFYDDQRDYQFNVYLPARNPSGMHGEEDAVVWGMETAYQVVEGKITTRNYDYHDARPYPGLNTEEDVTRGDRTTYGEAYHYRDDYRIPGDRYAYQPETESGVFYARLHHERYLNQRIRLRGMTTSATLVPGQELKVKGDAPETFRKGAIITHITNSARRDSSFEMTFTAIPYSETVCFRPERVPKPVMAGTIPARVSSTKVNDTYGDIDKDGLYRVAFNFDREKWPQGGESLWVRLARPYAGENYGFHWPLLEGTEVAIAFEGGDPDRPYIAHALHDSVHPDHVNLYNYKRNVLRTPANNKLRMDDERGREHIKLSTEYGGKSQLNLGHLVDSQRPHPDKRGEGFELRTDDWGAIRAGKGLFISADKQARAGGEVLAMEAALNQLQQAQTLTEALCGAAEMAKAELADLQQQKALLSETLAELKKSALLLSAPEGIAQTTAKSLQLAAGENIIATSGKSTDFSVLKKFTVAAGERISLFAQKLGIKLFASKGRVEIEAQGDEMGLAALKDITVNSHEGKVIISAKQEILLVSGGGYIRIGNGQVECGAPNHIIQRAAVWQKFGGQSVSQMVSQRETVDFSVTPQVLWPFDDMPVKDQHAFLHNHDDSQHSSITGADGKTAKQKKLGVEAIKFYLKEGKEZ

SEQ ID NO: 3778 - protein, 540 aa, Photorhabdus luminescens
GVIMTDSSEKVVVYPVYDEHGRLYYPLVSAPSHKDLTAICYKVPNRVIPVIFLPGVMGSNLQDQYGTSVWRLDGISSTLEWFIRGAETRKKLLDPENTVVDSRGKVDDNHKEGPKFPSRQERGWGQASYMSYGEFLPWLQAALDDQDELLFNRLNKTGELTLRQKLEFMDLQAETGEEKLLSKEIKLSYQYQFPVHVMGYNWLQSNADSANQLAEHLIDIITHYKQRGQPCEKVILVTHSMGGLVARHYSEKLEGSKKILGIVHGVMPTYGAPTAYKRMKAGEGGGVGLVIGSNGAKMTPVMAQSPGPLQLLPSLRYGTGWLQIKDGKTLYTLPKRDPYEEIYLQRDKWWGLCEDRLINPTNEKRNPVVMQADWKKYTHILSRVVQPFIEELTGCYHGNTYAFYGNSTEHLSYGVVRWTRRSYVDRGDDPNLAFNRPVYDPFNNHLSDTRMVGYSLDPNKPDDHSHLRAFILEKPQQPGDGTVPVQGGKFTAGGLRSILGAEVDHEHAYNTDKTRFFTLRAIIKIAQLVKQTSLAYPDEZ

SEQ ID NO: 3779 - protein, 1050 aa, Photorhabdus luminescens
MPKFFIDRPIFAWVIAIITMLAGLLAIMKLPVAQYPTIAPPAISISATYPGADATTVQNTVTQVIEQNMNGIDNLVYMSSDSDSAGNMNITLTFEAGTDPDIAQVQVQNKLQLAMPLLPQEVQQQGIRVDKSTTSFLMVAGFISEDGSMSQDDISDYVGATVKDPLSRVTGVGDTMLFGNQYAMRIWLNPDKLVNYKMTTLDVINAIKAQNNQIAAGQLGGTPPVPGQRLNASIIAQTRLTSPEEFSNILLRVNTDGSQVRLKDVAKVELGAQSYNIIARYNGKPAAGIGVKLATGANALDTSKAVKEALNNMEPFFPHGLKIVYPYDTTPFVKISINEVVKTLVEAIMLVFVVMYLFLQNFRATLIPTIAVPVVLLGTFAILATFGYSINTLTMFAMVLAIGLLVDDAIVVVENVERVMQEEGLSPKEATRKSMGQIQSALVGIAMVLSAVFIPMAFFGGSTGAIYRQFSITIVSAMVLSVLVALILTPALCATMLKPIAKGSHGKQTGVFGWFNRIFDKSTHHYTDSIGRILRNTGRYLVIYVFLVAGMAVMFTRLPSSFLPEEDQGVLLTMVQLPAGATQEQTEKVLDKVSDYFNTEEKDRVVSVFTVSGFGFSGQGQNTGLGFISLKDWGERPGAENKVPAIVARASAHFQTIKEGMVFAFNIPAIVELGSATGFDFELIDKANLGHDKLTAARNQLLGMIQQHPDMLVGVRPNGQEDTPQYRLRIDQEKAEALGVSIADINSTLSTMFGSNYVNDFIDRGRVKKVYVQSEAPYRMLPSDIYKLYVRNKQGEMVPFSAFTDTSKEPWTYGSPRLERYNGLPSMEILGEAAPGKSTGDAMALMEELASKLPNGIGFDWTGMSYQERLSGNQAPALYALSLIVVFLCLAALYESWSIPFSVMLVVPLGIVGALLATTFRGLDNDVYFKVGLLTTIGLSAKNAILIVEFAKDLMEKEGKGLIEATLDAVRMRLRPILMTSLAFMLGVIPLVLSNGAGSGSQNAVGTGVLGGMIAATSLAIFFVPVFFVVIRRRFSKKAEEIEPASESHZ

SEQ ID NO: 3780 - protein, 373 aa, Photorhabdus luminescens
LNKLPWLIPMNRKRVLIIIAIVSLLVVVFYGLWQQLQPYPPHTMLNQKEKLAVDKLLTNLQTRCIGRYLVDLPADYNNTVNMARVNDSWVETQRLYLPAFEQRIQLREEALRQTKTVNPVNMPYLKNIYRLPEGMQGIIFERVQDQSVSDAARVLEAHLYNNGVAIKVEMKVSNASAARYDKGRQTFPDIYDNDVPEKLVELKNLLSRIQGRKETEIPTTAGSCIPNAFIIDNHRDKEDIGSLYKTNPDNYLNVRIQTDNFIREKDSMLERLGVIKASLYRGSIFRKGVRKINKLDTEELLLVGQQPNSDDPRYQFTLLTNEKTGGKETPVFDLTVVNDEETPTAYTQNEIVAFWDAISQTVRVRPGAFKRQZ

SEQ ID NO: 3781 - protein, 370 aa, Photorhabdus luminescens
KLNRKTTLLTLAVIYTLWWHMPVFYYPILTEKEKKMTTEMLSNMQTRCVGRYLIDLPAGFDNVADRGIFIGDAQIETERLYPPAFEQRIQLREQKLKEAKTIDPKDMPFLRKVYRLQDNLKGVIFEKNEDIDIPSYARVLEAHLYNNGVAFTITMKFMDLSDEKYARDRAGFIKDGFSEDKLKATDRTMMKMRNLLSRISGRKDTEIPTEAGTCIPDGFITGSRDEKENMTFIYERNESDHFTFSIEILNDLQEKDHMLDRIVSMEGVLLAMHTKLIRKGKREIHGTYTEEILAKVPTKVIDQPEIEIPGYAFNLIANETAGDYKNPFVNIELVNDRSSATPYSENELITFWDAVTSTFRKRPGAFKRQZ

SEQ ID NO: 3782 - protein, 378 aa, Photorhabdus luminescens
YRAIIMSWPIPEIPELKVVAPLRYRLWFIILLLILIVGTLVYAVLKDTTDFYYAAIYSSFPSFLVWLLLFGAVLNRYEQYCAAAYAWEEASAETRFQWQQWSRKQLAVIGNIILTPEQQGIAPLLGDAEEIPAFPEQGRALSLPSSDRRQLLAKMDQDFEQQCPGYRSLLRQIYIASDDHASYESAIYQQWKISILPIINRDEIDKLYDEDDFEGLIMVIAFQCWPSENNKKAYSEFVSAQLFSSTKFATQEKLTVLAGMGRTLPSLPGEIIKDLQILFEYNRIDKNNMRHLWITGVTNDVLTELAINSHDSAFNLFTENSVHLIDHTFGPPGPLSIFLASAMLTEAISLTGSDHIVINQLPEGSASLYLMTKELHQZ

SEQ ID NO: 3783 - protein, 1128 aa, Photorhabdus luminescens
GITSMKVNRHHQYGYFGYIFITLSLVGIFLMLIYLNKTLLEERGLLKSALYAYATVFPLLLIGLFSNAVWWHIRQNKAQKKLRPETERTADRSSQSALVLSDLGDRMRLRYGRFWWYKVRILLVVGEVEQVEAIAPGLTTTHWLEGYRTLLLWGGSLQAEPNTAQLMALRRLRRYRPLNAIVWALTENQSAQPVWMDKALRMLQKQAHQLRWQAPVYLWQVCHSTWSQEGRITQTVGCFFPERCTPDIVATQLQTLVDPLRERGMQQLLEKTAHDFLCRLSANLKQQGIAHWQQVLTPWLAEYGDVVSLRGLMFSLPLKAQTTRLPQIWLPDTAWQGVLEGSRCFHGRRVGMLHTQTVCRGLIVLGLLWGAGMVLSFFTNRDQLAVVQAAVTDLKVQPENSDAQLMALKDLRNEVDRLQDRAEHGVPWYERFGLSQNQKLLTAVLPDYAQVNNRLIRDKAAAVLHAKLSALVNLPPGSPLRAKWAQAGHDQLKAYLMMAQPEKVDAVFLTRILDENEPERAGIAPAVWLDMAWDLWSFYAENLAAHPEWRITPDKALIKQVRQLLLLQLGKHNAEAALYQQMLQSVEKNYSDLTLRQMTGDTDAARLFTTSHVIPGMFTRQAWEGGIQKAIAEAVASRKEAIDWVLSDNRQAVSASVSPEELKARLTARYFTDFAGVWQDFLNSLRWNKTRNLSDVIDQLTLMADGRQSPLIALMNTLAYQGETGQQGPSLSDSLVKSAKTLLNKKTPRMINQQTAGLHGPMDETFGPLLALMGENQAEGRIKADSTLNLQTFLTRVTDVRLKLQQMNNSDDPPAMANALAKTVFEGKSTDLTDTQGYGRLIAASLGGQWRSFGQTLFVEPLAQAWQGVLKPATANLNSQWQTAIVDNWDRAFAGRYPFAGGDSEISLPMLGQFIRSDSGRIEQFLTRQLGGILHKAGNQWVVDEVNGQGVQINPDFLKAINQLSQLSDLLFADGSQGLRFELRARAVRDVVETDLTIDGQKLRYFNQMESWQSFRWPGETYKPGVMLTWTSVNAGARLFGDYQGNWGLIRWLAQAKAERLDESRYRLIFTAPDGLPLTWILRTELGEGPLALLKLRGFKLPKNIFVVTPGNHTTISAVNDDDLITEZ

SEQ ID NO: 3784 - protein, 810 aa, Photorhabdus luminescens
LMAAENLGENMTNLTPMIIFDHSRYRLKVWRNKAPLDVLAFTGQEALSQPFRYAIEFTSAEKGIEPAQMLMQQASFTLTSPAINPGIRWMPIVPPEPLRSVYGVISGFKLLSTSRDESRYEVTLEPRLALLARSHQYAIYQKLSVPEIVEKILRERHGFRGQDFLFSLAYSYPRREQVMQYGEDDLRFIQRLLAEVGIWYKVTADDRLKIDVVEFYDDQRDYQFNVYLPARNPSGMHGEEDAVVWGMETAYQVVEGKIATRNYDYHDARPYPGLNTEADVTRGDRTTYGEAYHYRDDYRIPGDRYAYQPEAESGVFYARLHHERYLNQRIRLRGMTTSATLVPGQELKVKGDAPETFRKGAIITHITNSARRDSSFEMTFTAIPYSETVCFRPERVPKPVMAGTIPARVSSTKVNDTYGDIDKDGLYRVAFNFDREKWPQGGESLWVRLARPYAGENYGFHWPLLEGTEVAIAFEGGDPDRPYIAHALHDSVHPDHVNLYNYKRNVLRTPANNKLRMDDERGREHIKLSTEYGGKSQLNLGHLVDSQRPHPDKRGEGFELRTDDWGAIRAGKGLFISADKQARAGGEVLEMAPAISLVKGAVNQVLEWGTVTKTHLNHQPDTESLKTYLQHVDQLKMAAMLLSAPEGVGIVSPQTVMVQSGQALYAQSAGDVHIASANRIGMNSIQAISLLAQNEGMRLVSGKGPLAIESHGDSLGLTSLNDVTVNSTQGHVQITAKNGLTLACGGAYIRLSPAGEIEIHGPGLLSLKGQHKMASPAKQDFPLPDLPESVCKTCLEKAQELSQGFVLRSZ

SEQ ID NO: 3785 - protein, 262 aa, Photorhabdus luminescens
PMNDHQIADWIASLASSVTETGISCIDMIVDQSGGKFPLIPALKSFSSEMDWCSLFQGLPEEIVTDKAPILIRIDLTQPVQRQWMNEIMMRLGGKPMLLILCSSWSFDRLSQYLIQCVDAAYAEKGGILRFYDPRIFPVLFSHVLDKEQQQQFFRPALFWSWLDRDGAPHVIWREGHAGPVDETFQKIDLTDEQLEHLLCVSDAHILMLKLSSQVEYSEFSREQLFNNCYALMIETSGEDILLDDDRESFVLKHLKARLSSZ

SEQ ID NO: 3786 - protein, 846 aa, Photorhabdus luminescens
SELPNQRTVGNEGTKNMSEIKHHDLVWLPAPFPSQGRLPAKNYLVVENCQQQSSQEKAYYQELCLAANRRVIRPCCNTLHVSLFFDGTGNNLYNDLYQAVPNHPTNVVRLFQATIGAGYAGGASGKPLLDNIESTGRKYFKYYIPGVGTPFPEINELDYSKLGLAVASGGEDRINWALLRLIDVLKRVLVNDTIDDVACQKSLKAMATTWNMLELGGSNNRYEEFYKQFASLKRELRIARSQPGRGKCKLLGMKLYVYGFSRGAAEARTFVNWLTELFPPSREAGQKPAQCLQHKHETDPDSKLPISVEFLGLFDTVASVGVPHMIPVVEGHMAWADGTQELPSEATYGGLVKRCVHLVSTHEQRLCFPMDSIRRSDGTYPTGSTEVIYPGVHSDLGGGYPPGEQGKAIGKRDNLLLSQISLHEMYSAAFEIGAPLKVPKDILPQELSQYSWRSMPPDVGDEFDIDTQLVNRFNAWRQVTLGLEMPQQPLSDEEAARFEPVRASVALEQAMKNQMDWLTAWRINRYANGTLLGEPFFHEAPNRDAKKAHYEQSEQAQKAAQQQVEAKRKVQWNEFFRDGGKTQPLLMQGVPDFDPETAQNQLREAAAEFRNDYYGDRREQHSKWQFLFDTVPRQAIYMLDDHDDLLEYLQMKAGGEALVKQLFRPVPAAKPGQQEPPESLLVALYDNQVHDSRAWFMYSTLGSREPWGGYFRYRVIYFGTICSRPLSLLSVAGTVAGFMSPAAESVLLLFKQNKVANTMGDAIDKVSKGTAAEWEVTAQYLTSGKLITLLAGPEYRKAFTHNVGEMTSQQRKFIEEQRLQTAKDNLKAHWAGKTQEPTPFKEPEKZ

SEQ ID NO: 3787 - protein, 400 aa, Photorhabdus luminescens
MWLYVSQLFSRLSGDVMKAIPLFPPYCQASPPRFKRWLGVGTGLVLLISNIVALIRPEIGDTFSLYALIPGLAALWLLCLLFRVLFYRFAVHNAWTYQQQVERVQQQWWRKHRQQIALVDYVLAGPLGCTPDVWNKVVNQPHCHVEPIEEESGQSVRLLRSFAADIEQREIQLAGMSVEQWHKQRKAQSPLRCTPLRCYWLGSVAAWQEFTAQMAERFPDVELPEQPQPWCGIDTLDEIIDLLNTTKDQHATILCAGCQCVDSEAESALPAGEAAFIWLLKKQGNVCLTRGEFFCSQSDEEVVDVAARTWVQADMSQPPATCFLFSQPDISSLEKLGWNITQHQQDLNWGNIGGMEAIVVQTLAAISAENTGQPCGWLARDPQHTLAFGIVKSYGTAREZ

SEQ ID NO: 3788 - protein, 1131 aa, Photorhabdus luminescens
NLMALQENKIPPISVVKTLILLIGTITLLVSLAGLGWWVWGEHRTTDAETFNHLLWVCGIAWVLTVVVSMLGFITVTLFVKNKVTDVKSDTRPLLPASEPYDYGDLGDRMRLRYGRFWWYKVRILLVVGEVEQVEAIAPGLTTTHWQEGYRTLLLWGGSLQAEPNTAQLMALRRLRRYRPLNAIVWALTENQSAQPVWMDKALRMLQKQAHQLRWQAPVYLWQVCHSTWSQEGRITQTVGCFFPERCTPDIVATQLQTLVDPLRERGMQQLLEKTAHDFLCRLSANLKQQGIAHWQQVLTPWLAEYGDVVSLRGLMFSLPLKAQTTRLPQIWLPDTAWQGVLEGSRCFHGRRVGMLHTQTVCRGLIVLGLLWGAGMMLSFFTNRDQLAVVQAAVTDLKAQPENSDAQLMALKALRNEVDRLQDRAEHGVPWYERFGLSQNQKLLTAVVPDYAQVNNRLIRDKAAAVLHAKLSALVNLPPGSPLRAKRAKAGHDQLKAYLMMAQPEKVDAAFLTRILDENEPERAGIAPAVWLDTAWDLWSFYAENLAAHPEWRITPDKALIKQVRQLLLIQPGKHNAEAALYQQMLQSVEKNYSDLTLRQMTGDTDAARLFTTSHVIPGMFTRQAWEGGIQKAIAEAVASRKEAIDWVLSDNRQAVSASVSPEELKARLTARYFTDFAGAWQDFLNSLRWNKTRNLSDVIDQLTLMADGRQSPLIALMNTLAYQGETGQQGPSLSDSLVKSAKTLLNKKTPRMINQQTAGLHGPMDETFGPLLALMGENQAEGRIKADSTLNLQTFLTRVTDVRLKLQQMNNSDDPPAMANALAKTVFEGKSTDLTDTQGYGRLIAASLGGQWRGFGQTLFVEPLAQAWQGVLKPATANLNSQWQTAIVDNWDRAFAGRYPFAGGESEISLPMLGQFIRSDSGRIEQFLTRQLGGILHKAGNQWVVDEVNGQGVQINPDFLKAINQLSQLSDLLFADGSQGLRFELRARAVRDVVETDLTIDGQKLRYFNQMESWQSFRWPGETYKPGVMLTWTSVNAGARLFGDYQGNWGLIRWLAQAKAEKLDESRYRLIFTAPDGLPLTWILRTELGEGPLALLKLRGFKLPKNIFVVTPGNHTTISAVNDDDLIEEZ

SEQ ID NO: 3789 - protein, 852 aa, Photorhabdus luminescens
LMAAENLGENMTNLTPMIIFDHSRYRLKVWRNKAPLDVLAFTGQEALSQPFRYAIEFTSAEKGIEPAQMLMQQASFTLTSPAINPGIRWMPIVPPEPLRSVYGVISGFKLLSTSRDESRYEVTLEPRLALLARSHQYAIYQKLSVPEIVEKILRERHGFRGQDFLFSLAYSYPRREQVMQYGEDDLRFIQRMLAEVGIWYKVTADDRLKIDVVEFYDDQRDYQFNVYLPARNPSGMHGEEDAVVWGMETAYQVVEGKIATRNYDYHDARPYPGLNTEADVTRGDRTTYGEAYHYRDDYRIPGDRYAYQPETESGVFYARLHHERYLNQRIRLRGMTTSATLVPGQELKVKGDAPETFRKGAIITQITNSARRDSSFEMTFTAIPYSETVCFRPERVPKPVMAGTIPARVSSTKVNDTYGDIDKDGLYRVVFNFDREKWPQGGESLWVRLARPYAGENYGFHWPLLEGTEVAIAFEGGDPDRPYIAHALHDSVHPDHVNLYNYKRNVLRTPANNKLRMDDERGREHIKLSTEYGGKSQLNLGHLVDSQRPHPDKRGEGFELRTDDWGAIRAGKGLFISADKQARAGGEVLEMEAALNQLQQAQTLTEALYGAAEMAKAELADLQQQKALLSETLAELKKSALLLSAPEGIAQTTAKSLQLAAGENIIVTSGKSTDFSVLKKFTVAAGERISLFAQKLGIKLFASKGRVDIEAQGDEMGLAALKDITVNSHEGKVIISAKQEILLVSGGGYIRIGNGQVECGAPNHIIQRAAVWQKFDGQSVSQTVQQWQTANYAVTPKAVRAYKISPLDRQNMQFHAEDGGVQALSTIQNGKTPLQKQVGVEISQLKIKDEEZ

SEQ ID NO: 3790 - protein, 288 aa, Photorhabdus luminescens
MSKSLQNLINLMKLEKIEEGIYRGQSEDLGFPQVFGGQVIGQALYAAKQTVVDDRMGNSFHSYFLRPGDSHKPIVYDVEILRDGGSFSARRVSAIQNGKPIFYMTASFQSHEESFEHQNIMPDVPYPEELIPQDEIVKKMSHLLPQKMQNTLLFPCPLEMRPVKYHSPFNCPPEEPIRYVWFRSNGNMPDNPFIHQYLLGYASDFNFLPTALQPHGVGFLEKNIQIATIDHSMWFHRPFRLDDWLLYAVDSPSASGARGFVRGQIYNREGILVASTVQEGLIRKRNRZ

SEQ ID NO: 3791 - protein, 539 aa, Photorhabdus luminescens
MMSEPKENEIFIHPEYDELGLPYYNVPNARIEENLVATCLKYATKVIPVIFLPGVMGSNLKSTEGESVWRLNRILSFDVLGWMCSGASYRKKTLDPNKTKVDDSGDITPDHTEKNKFQTCKQRGWGEIAHMSYGTFLPWLQAVLDDERLAFEYCLAEKGEKTLRQRMVDMSLNAEWGEEPLTEAEVDHSYDFLYPVHVMGYNWLQSNEESAKRLEQYVDKVLAFYGKRCATKKVILVTHSMGGLVARYYSELLNGRDKILGIVHGVMPATGAPTTYKRMKTGEDGVTGLVVGYDGEDMTPVLAQSPGPLQLLPGKEYGRGWLHIADGKMTHKLPKSDPYEEIYLEKDRWWGLCETRFLNPDKKDKWKDGASWNSYRKLIRNTVKPFIEELTSKYHPNTYAFYGASEKHLSYGVISWQEASKDYYNKTEDYSGLTFDRPIYDPYNLETGATRMVQFSVGPSFQDIAAKTFKLAPPKEPGDGTVPVQSGRIAARYLRSLLATEVDHEGAYKQDNETEETFARLFTLRSIVKMVQAVKGENZ

SEQ ID NO: 3792 - protein, 370 aa, Photorhabdus luminescens
KLNRKTTLLTLAVICTLWWYMPVFYYPILTEKEKKVTTEMLVNMQPHCVGRYLIDLPAGFGNVAEQGIFIGDAQIETERLYPPAFEQRIRLREQELKTMQSVEPKDMPFLKKAYRLQDNMEGVIFDRNESFGIPGFARVLEAHLYSNGVAFTVTMKFMELSDDKYKEDRDFYIRQGFSERQYNELYQTLEKMKRLLSRISGRKDTEIPTETGTCIPDGFITGSHDEKENMTFVYKRDESDHFTFNVEILNDLQEKDHLLERLRGMEGMFLSMHAKIIRKGKREINGTYTEEVLTTAPTEKIEEPETKIPGYKFILIANETIGDYKNPFVRINLRNDRSSATPYSENELIKFWDAVTSTFRKRPGAFKRQZ

SEQ ID NO: 3793 - protein, 378 aa, Photorhabdus luminescens
YRVIIMSWPIPEIPELKAVSPLRYRLWFIILLLILIVGTLVYAVLKDTTDFYHAAIYSSLPSFLVWLLLFGAVLNRYEQYCAAAYAWEEASAETRFQWQQWSRKQLAVIGNIILTPEQQGIAPLLGDAEEIPAFPEQGRALSLPSSDRRQLLAKMDQDFEQQCPGYRSLLRQIYIASDDHASYESAIYQQWKISILPIINRDEIDKLYDEDDFEGLIMVIAFQCWPSENNKKAYSEFVSAQLFSSTKFATQEKLTVLAGMGRTLPSLPGEIIKDLQILFEYNRIDKNNMRHLWITGVTNDVLTELTINSHDSAFNLFTENSVHLIDHTFGPPGPLSIFLASAILTEAISLTGSDHIVINQLPEGSASLYLMTKELHQZ

SEQ ID NO: 3794 - protein, 1128 aa, Photorhabdus luminescens
GITSMKVNRHHQYGYFGYIFITLSLAGIFLMLIYLNQTLLEERGLLKSVWYAYATVFPILLIGLFGNAVWWHIRQNKAQKKLRPETERTADRSSQSALVLSDLGDRMRLRYGRFWWYKVRILLVVGEVEQVEAIAPGLTTTHWQEGYRTLLLWGGSLQAEPNTAQLMALRRLRRYRPLNAIVWALTENQSAQPVWMDKALRMLQKQAQQLRWQAPVYLWQVCHSTWSQEGRITQTVGCFFPERCTPDIVATQLQTLVDPLRERGMQQLLEKTAHDFLCRLSANLKQQGIAHWQQVLTPWLAEYGDVVSLRGLMFSLPLKAQTTRLPQIWLPDTAWQGVLEGSRCFHGRRVGMLHTQTVCRGLIVLGLLWGAGMMLSFFTNRDQLAVVQAAVTDLKVQPENSDAQLMALKDLRNEVDRLQDRAEHGVPWYERFGLSQNQKLLTAVLPDYAQVNNRLIRDKAAAVLHAKLSALVNLPPGSPLRAKRAQAGHDQLKAYLMMARPEKVDAVFLTRILDENEPERAGIAPGVWLDTAWDLWSFYAENLAAHPEWRITADKALIKQVRQLLLLQPGKHNAEAALYQQMLQSVEKNYSDLTLRQMTGDTDAARLFTTSHVIPGMFTRQAWEGGIQKAIAKAVASRKEAIDWVLSDNRQAVSASVSPEELKARLTARYFTDFARVWQDFLNSLRWNKTRNLSDVIDQLTLMADGRQSPLIALMNTLAYQGETGQQGPSLSDSLVKSAKTLLNKKTPRMINQQTAGLHGPMDETFGPLLALMGENQAEGRIKADSTLNLQTFLTRVTDVRLKLQQMNNSDDPPAMANALAKTVFEGKSTDLTDTQGYGRLIAASLGGQWRSFGQTLFVEPLAQAWQGVLKPATANLNSQWQTAIVDNWDRAFAGRYPFAGGDSEISLPMLGQFIRSDSGRIEQFLTRQLGGILHKAGNQWVVDEVNGQGVQINPDFLKAINQLSQLSDLLFADGSQGLRFELRARAVRDVVETDLTIDGQKLRYFNQMESWQSFRWPGETYKPGVMLTWTSVNAGARLFGDYQGNWGLIRWLAQAKAERLDESRYRLIFTAPDGLPLTWILRTELGEGPLALLKLRGFKLPKNIFVVMPGNHTTISAVNDDDLIEEZ

SEQ ID NO: 3795 - protein, 836 aa, Photorhabdus luminescens
RTLGNEGTKSMSEIKHHDLVWLPAPFPSQGRLPAKSYLVRENCQQQSSQEKAYYQELCLAANRRVIRPCCNTLHVSLFFDGTGNNLYNDLYQAVPNHPTNVVRLFQATIGAGYAGGASGKPLLDNIESIGRKYFKYYIPGVGTPFPEINELDYSKLGLAVASGGEDRINWALLRLIDVLKRVLVNDKIDDVACQKSLKAMATTWNMLELGGSNNRYEEFYKQFASLKRELRIARSQPGRGKCKLLGMKLYVYGFSRGAAEARTFVNWLTELFPPSREAGQKPAQCLQHKHDTDPDSNLPISVEFLGLFDTVASVGVPHMIPVVEGHMAWADGTQELPSEETYGGLVKRCVHLVSTHEQRLCFPMDSIRRADGTYLTGSTEVIYPGVHSDLGGGYPPGEQGKAIGETDGLLLSQIALHEMYAAAFQTGAPLKVPKEVLPDDLQDQLWRAMSADIQREFDIDTQLVNRFNAWRQVTLGLEMPQQPLSDEEAARFEPVRASVALEQAMKNQMNWLTAWRINRYANGTLLGAPFFHEAPNRDAKKAHYEQSEQAQKAAQQQVEAKRKVQWNEFFRDGGKTPPLLMQGVPDFDPETAQNQLREAAAEFGRDYRGESREQSNLKQFAIETLAYHMLYIWDSNDDVKEYQQMKTAGEALVKPLFRPAPVGKTGQQESPESLLVALYDNQVHDSRAWFMYSILDTREPEGGYFRYRIIYFGTECNKPLSPLTIAGNVVGSTTPVGAALLFLKDKKVGNMLSDAADKVPVTTWEVTARYLTSGELITLLAGPEYRKAFTHNVGEVTRQQREFLKERRLQMTKDDLKARWAGKTLEPTPFKEPEKZ

SEQ ID NO: 3796 - protein, 328 aa, Photorhabdus luminescens
MKTEILANMQTRCIGHYLIDIPLAFENIINNEIFIGEAKIETKRTHLSAFEQRIEIREQKLRTTKTTDPKDLPFLKKIYHLQGNLYGVIFDRNNSVSEPGFSRVLEAHLYDNGVAFIIEMKFTEISDDKYSYSKDRYIKSGLNESQYKMLSQTLDKMQRLITRVSGRKDSDIPTVAGICIPDGFIADYNDEKESIKFVYQGNQDDNFTLSVEIINDLKGEGTLLERISEVERDWFINYGKIIRKGEREINGIYGEELLAVGLQSFDNSPRYQFDFIANDMMLDDKKICVVIMLMNYQLPATPYSEDELIMFWDAITKTFRRGPDAFEZ

SEQ ID NO: 3797 - protein, 587 aa, Photorhabdus luminescens
MDDLTLRYYEAEMRYLREAGREFAKAHPDRAAALNLDKIVMRDPFVERLFEGFAFMIGSLREKLDDDLPELTEGLVSLLWPHYLRTIPSLSIVEFGMDWAQLKNSVQVKKGFEILSQPIGPSKTRCRYTTTQAVQLLPLALTDASLQEEPNGRSVIRLRFDCGTLVDWHQIDLSCLPLYLSADSPLAYALHRAFTLQTQQLYLRLPGQPDRQPFDGRFSPMGFGEEERLWPKGESSFSGYQLLLEYFTFREKFMFVTLCGLEKLTLPERTPWFELDVVLRESWPFDLPFSAEHIRLHCTPVINLFRLESDPLQLAPLQTEYLLYPVRYQDGHTEVYSVDEVSSSKREGHQYVPFSSFRHKGGMLRHDAPECYFHTRVKRGPSGLCDTWIILGGADFDDNELDEEDILSLTLTGTNGQLPRRALQDTLLNTAVNPPLAEFTVRNLCEPTLPCYPPNRDRFHWRVLSHLGSNFLSMMDNPEVLRGTLALYDWSDNEMNYRRLEAIVAVKHSLIERFEQGSLRRGVHIEVTLDSNGFAGAGDICLFGEMLSRFFALYTDIHLFNRLTLILQPTGERLLWEEQHCQNIPGZ

SEQ ID NO: 3798 - protein, 377 aa, Photorhabdus luminescens
PTYADFTTYGGTTVMGRTTLSEHSRLMAILESEISTLDFYQFCQMIERAVPDRPPLGSTENPVDDAIRLRPHPGLGFPASELKAIETDSEHPERPPTARTNFMGLYGVDSSLPTAYLNDIVQQREGNETIEAFLDIFNHRMFTQFYRIWRKYSYPATFATGGTDRTSQCLLGLIGLGIPGSQQQIATPMSRFLALLSVMRLPTRTAEGVSALVALLAPQTRIVVTPACPRQIHLMQPANLSDTHRISLSQRTVLGRMGTDINSQLLLALHTDCPDEAWGWLPGGQLHTDFLVLLRVYLGWRYQARLQLTLPTRILPPPLLGGQPVRLGLTGVLGLKAENHQLAVPDNITVNLGCYQGISPDSNQDKGGDYVNYPFLZ

SEQ ID NO: 3799 - protein, 263 aa, Photorhabdus luminescens
NHITLENSYEKHQFYRYISESARESQSRMFIQAENFQGVFMKNYIISPQIINTMEISNEPWGIKDSSSNFIYGNSATKKYIHNFKASFNYDGLYDHELPWNGAEFAKEFIIQDRMVMAKEQRICSVETHIFGQDQILSSYFCEKLPFYHEDGNCIGVMYHCWEAKSYSLASLHQYYKELPTSIILQPPSDIFTPREWDIIFFFLQKYTRQQIKQILNIAYRTIETYMAQIYKKIGIHSSQQLEEYCLANNFHHYVPEKFLLSZ

SEQ ID NO: 3800 - protein, 232 aa, Photorhabdus luminescens
DLIMNKINKVDISPSVINTMQQSNEPWGIKDKNSCFIYGNLALKHIQNLPDSFDYEGQYDDEIPWDGAGFAKEFVIHDKTVMEKDSRVCSLETHMFGKDNFLSSYFQEKYPFYNDDNECVGTMFHGWKAQDFSFTRLFYGKLPSSILFSPPTDIFTKREWDVIFLMLHKYTSKQIGRMLNISYRTVESHFSRIYKRIGVHSSRQLEDYCRTNDYDLYVPERFVKRKSKMFSZ

SEQ ID NO: 3801 - protein, 428 aa, Photorhabdus luminescens
MKRQFSVAASVVASCVPSLSQAAEGVVDKADNAFMMICTVLVLFMTIPGIALFYGGLLRSKNVLSLMAQVMVSFALVCVLWVIYGYSLAFEPGNGFFGGFSQVMLKNLAFTDLSGNFYQLIHVAFQGSFACITVALIIGALGERIRFPALLVFTVLWLTFSYLPMAHMVWGGGVLSQDGALDFAGGTVVHINAAVAGLVGAYLLGKRTGFGKEAFKPHNLPMVFTGTTVLYIGWFGFNAGSASAANEIAALAFLNTIVATAAAILSWVFAEWLFRNKPSLLGACSGCIAGLVGITPAAGMVGVGGALIIGLIAGFTGLWGVVALKRWLRVDDVCDVFGIHGVCGIVGCLLTGVFTAKSLGGIGYAEGITMLGQVGIQAFSILVCVIWSVVVAFIAFKIADLLVGLRVTVEIEREGLDINSHGESAYNZ

SEQ ID NO: 3802 - protein, 287 aa, Photorhabdus luminescens
LYSYQFKVSLLNSKNSINKHTLFDEKSIIFYYMAVNLRYNRKSNHSDNDLNRNLGVTMSNIRNKSTLITPQLTLMWDKSNEPWGARDHQSRFIYANPAFYQLLNLPEDFDIIGLTTGELPSPIAEYAEEFHRQDQKAIQTMQRITSLETHRFGENNVQQSYICDKFPLYDENNDCIGIFFHMYQPQDFSVSYYYDKTLPSNLQFTPPNNILTQTEWEVLFLTLRSQDEESIGEELTMSTEDVVNHIQSIYQKFNLPLQIELADFCQKNNYHLYIPERFITIGSRELZ

SEQ ID NO: 3803 - protein, 221 aa, Photorhabdus luminescens
RGIGGGYMPARLVNPEKVNEVFAHLNESSDNHTLYTALMNGVDITDQIKGLLLSPGYRMVRVDGRFGNRISQSHFELALVNDVSKEVAYYNRVVIQPDVVSNCRPVTQILVWRIRTPQHRAVLRDLAGKVFFDYLLEHYNVIVSDMNQTTDGIAFWQDRMYDALAYNMHVYAYDMITCELRKILTQNDVSRQESWLWGDPEHHQNRLAIISKSELPIYGVZ

SEQ ID NO: 3804 - protein, 3532 aa, Photorhabdus luminescens
IKGLFMGKSSNRSAEYFFTGRYYDDDDGNNIVAIGVGGIIYAKGGDDRITLGSIGATVYADSGNKVVNGGAGYLKIVDKEGNLAVHGAAGYSGIDKCGNGNISFTGTAGGVSMDHRGDHGDLNFSGAAAYNGLNRQGQSGNVTFNGVGGYNELWHETNQGNLNFAGAGAGNKIDRTWYDHYEKSHGDVKFDGGGAANSISSRVESGNINFTGVGADNHLIRKGKEGNIILHGAGASNRIERLRQNQDQYEQTHGNIEFEGTGGYNRIYSDIAHGDITFEGAGAYNEISRIGEDSDSRNEALEYAKAEEIVLTTAMMGGSWIQQSQQVTGIKSTAEPDTYLFAFADEMYTKISKVQLRNDPETGKLSYYATSWYKEGNHLNNLATENISSSNGFFDIRSNGGYRLFNLIFEHHHPVIIQHTVEEDLQENQWVTYAGGTNARAENVMLTNAKMHGNAIHSGGLILDVSAVKSNRQANTYIYAKYVESYTKVVMVELRNDAKTGALQYYASAWYKAGDHTSNLAAEKVSPQNGYRSMDIGGYSLTNLQYQVNTVRRVSEHLAQTEEYSHQELVKSSADMGDSSGDINFKGMGGGNVITSSVTRGNINFEGAGAANVIVKKGEQGDLTFRGAGLANVLVHQGQRGEMDVYAGGAANVLVRIGDGRYLARLLAIGNISIHQGNGDSRVSMFGGYNTHSQIGNGNANWLGAGGFNVMTQTGKGKVSSVLAGGANVLTKLGAGDLDAGMLGGANIITHLNDGEISGTTAVALGGANILTKKGRGKAIALMGGGANVLTHIGNGSTTGMMLGGANILTKVGNGDATGIMLGLGNVLTHVGSGQTLGVMGAAGNVFTKVGSGTTIAAMIGAGNIFTHVGNGDAWGLMGGLGNVFTKVGNGKALALMIAAGNVFTHIGDEMSVALMLAKGNIATKVGNGMMLAAMIGEANVMTHIGNGSTFAAMIGQGNILTKVGNDLALGLMVGEANIYSHVGNGTSIGLFAGELNVMTRVGDGTTLAAMFGQANIMTHSGNGLTGVLALGEANIVTKVGDDFMGVVAAAEANVITHKGSSTTAAVLFGKGNILTKVGDGTTVGLLISDVGNIMTHVGDGTTVGFAKGKANIITKVGNGTGVNAVWGDANILTQVGDGDRYNFAKGKANIITKVGNNQEITVVQGDANIITHVGQGDDYTGAWGKANVITKVGDGRNVVLAKADANIVTQVGNGDSFNALWSRGNIVTKVGDGMQVTAAKGEANITTKVGNGLSVTATHGDFNINTNVGDGISINAAWGEYNVNTKVGQGLNVAIMKGKGNANIHIGDGLGINASYARNNLAIKVGNGDFYTLSIAESNTQSNNLPFLFKSIKRTVLSVEGSQAINYLIHGNEANSSGTYRSRGAINLTEVSAIDGFQMNAIDDVGSDLRDKLSGTVTQVEIPDTEAIQNALHIGDKVDSTQSESSSQADAVIKQAKQDSAEQNALNDKEKAEENYRILEQERDNQLKEISKPQFQLESTDQNVLNTNGQVQRDAISGESRAVTKELLSMTQRLNALNDDGNYAGELGDEWRNRFAVGYLDRIQEKLDDTKLISQKKLADLSPRFIDNQQQVKNAVGKSETGLEQSYHNIKNADDNIEDAHTKAKSRQKEADLQRLRATKAESDAYAVYEEAKQRGEHDSSVAKNKAAQVQADAKGAKQTGDVKPERSGATGSGLSGKAYTPIDVAKPKSHINPEAKMEANGWNSEDLTLTAADLAGLNSAQRAINRLQINRSSRPENVGASIISLLTGTPSDRVVEPISNQTRKLITTAPVMSGINLQGLGQVIGGDSFKSHSSILREFEPFLLSQGDKRFIASTKRYLGQINTDRPSKALVAVREAFNNAAEQPDEQHVLQLEQALAHWQQHDPNEFAKRGRLVKSLRFEMGELVAYLQAKRAESAGILGVSLAPDHVAQFDQQVSFDGFGRVVGLKGDIAQSDIHRLTDLQIKPLTQINSAAEREAPKTESESLIVFVSRLQQEAIPEGMPLIERAKNLWLSGQVTRQETIKLFEDAVSQLQTHPELHTLAQQLLADARKEKTTGQYIDNLFGRHFDSELADELVKTAPQDAMTTARQTGQFLVERFEQWIGGFYPDVAEREKIIAKKMAGFARAINKDFRPWFSRVPELTTFLDEPTFANFKIMMTQVDDGFAVIKIPFLAVKMAITSGMGMGRAQWKVAGDRFYEEVITKARSTSSQLTSGADVTYNVEITEKQTNDYGTALPYQPANNKHDDFLYGRKVAAGRILVPGWETRFEHNALAQGHSVVTGASGSTNIMVHLNNYIASEQIASEQPTFSVRQSYLNTLVFLVFDGGHSVNESLAVYRALQVTDDEQRKQLLNSYTANYRELVDIAGEEGKVWVSQALDNAFRETGEFYQKHAKVKPQSRPAVEALDWLSGKNKRPEPTIIDDTHQDKKISRLLGDWQMEQVTPQADGRETRFDGQIIIQMEDDPIVAKAAANLAGKHSDSSVVVQLDSKGKYRVVYGDLTRLSGKLRWQVVGHGRDTSEQNNIRLSGYTADELATRLTRFYQDVNQGKSITHKPDHISIVGCSLISDDKRDGFARRFITVLDKQGIRSDVSARSSEVAVDVSGRKFTRDQNNQWVNNLPDNKIVLSWYDQNELITHTELVRRGIAESDINFSKVGYTEADTVINGAISGNVELFVKPNKRENTIQIDSNEKTNNQLSYSGNIQVNVGDGEFTALNWGTSNVGIKVGSGGFKSLAFGDNNVMVHIGNGDSKQSFDIAGYQALEGAQMFIGNRNVSFNQGRSNDLIVMMDKSIPTPPLINPFDGVARIADVLQGVAGASEDQDWLAAQDQQWTIAGAKKFVQDLSGLDQTSNVDYNTLVELDSQHERSSRGLKYDAELTLNKKFNQWLGEHGNGADMGKISRMDKFRQANQKLAFNFAVGGRGADIQVTTGNWNLMFGDHIQSILDTNLGSLFGLMTQQYSATGMAKTTFTYNPQDLPRQLKNKLIGRLASVNADTTLADIFGVNYTAEGKIISRTGESVDGEAILQEMLEVIGEFSGDQLQAFINPETLLDSLKAGIDMGEEGVRSFAESHGLKQKAPDERQESGSSVNINGENVQTNNKPKPAFGFNSLNLPNLFATMFSEEKQREMKSLVANLKENLTTDLLNMEEKTFDFLRNSGHLQGDGDIHVSLGNYNFNWGGDGKDLGTYLGDNNNFWGGRGDDVYYSLGTSNIFSGGEGNDLGVLMGRENWMFGGKGDDTAVVAGRINHVFMGEGNDQTFVFGEGGFIDAGNGQDYVVTAGNYNRMDTGKGQDYAVIIGNNNQAELGGGDDFARVFGNDNRLDGYCGNDAIKLMGYHAVINGGEGDDHLIAAAISKFSQLDGGEGQDLLVLGGYQNHFRGGAGVDSFVVSEEVIDNRVSDINAEDMILFNGVDWQNLWLQRSGYDLVLSVKRHTQDNTAQGRFESEGSVIFNDYFNGNRAKLVTRMSDKNASGEREFTALSDNAVDSLIQAMSGFAPAVGDNGFIAGLDSQAKTAIATAWTDVTIGKGKFAZ

SEQ ID NO: 3805 - protein, 222 aa, Photorhabdus luminescens
LIDFIRVNLVRVAHLEVHYMCRLPVWYFEKVLEVSMFCEEKVAQMAAYLLYKRGGRMAYLKLMKLLYLADRVSMNDYGYPITGDRMVSMPRGPVLSQTLNLITGDYASDEFGWGAWIKSEKNYEISLKRKGITRDDFESLSDAELEVLDAIWEQFGHMSRFDIVEYTHKHCTEWQDPGGSSYPISPSSVFIAVGKSPEVAEKLAQELIERQQLDCFLQGLRZ

SEQ ID NO: 3806 - protein, 527 aa, Photorhabdus luminescens
YLNICWKKDMAKTGNERLAEALRAASDAAVGNVLSSKSITDKQRTLLINKGYFKQIIRGWYLLDADLTTEKAGDSVLWYESIWSFVGQYVESIFEDDYWLSPESSLDLHTANNALPNQIIVYTSDTTPRTLNLPNNMSMVIIKGRVPCKTVKVNGINVHSLESALVETGPQTFRANPISIQLALRNADLSLLSEAVLTTKNVASGNRLIGAYQQLKMRAESRKLQTIMEGAGFEGIKQVNPFGHIPMIVGGSRGESPSAVRVRLLWQEMRQEVVEVFDDFPPPFDFFERSIEKTHAMMSSLYISDAYNSLSIEGYKVTPELIERLSKGDWSPNTIQRDKEQKDAMAARGYYDAFNKVKELLREAHEDKEGLDIHYLIDVGLTDWFTALFNPCVDAGIIDRLDLAGFRKGPIYIRTSMHVPPSSEQLMDCMEALKELIATEKHFVVKAILGHLFLGYIHPFPDGNGRTARFLMNFLLVIGGYPWTVIKLKNRTQYLSALESASVGKNVKPFAEFVQQSMQEVEHNMKZ

SEQ ID NO: 3807 - protein, 339 aa, Photorhabdus luminescens
MGSTGSVSAWDEALLIAAIQYPVPIIRGPEDIQVQVQQICKTMDSTKAGYPDLDFIVFPEYSAQGLNTKIWTYDEMLLSLDSPEIDCFRRACIRNDVWGVFSIMERNEDPSQIPYNTAIIINSNGEIVLHYRKLQPWVPIEPWMPGNLGMPVCEGPKGAKLAVCICHDGMFPELAREAAYKGCNVFIRISGYSTQVNDQWIWTNRTNAWQNLMYTVSVNLAGYDEVFYYFGEGTICNYDGNIIQQGQRNPWEIVTAELFPRLADKARENWALENSIFNLGCRGYVGKPGGERANYLTWVRDLANGEYKLPWDENIRIRDGWKYYPEGVKLGPLPKIDEZ

SEQ ID NO: 3808 - protein, 313 aa, Photorhabdus luminescens
VAKKEKRPHHDGLFKYFLTQPETAREFLSLYLPEEIQSLCDLATLKLEPGSFVDEHLRQLHSDVLYSVETARGQGYIYCLIEHQSTPDPLMAWRLMYYAMLAMAAHLKKGHTELPLVAPLLFYHGEIRPYPYSNRWLDCFTLPEQAARLYRQAFPLVDVSVLSDEEILTHKGVALMELVQKHIRCRDMQEWLLQLVELLNAGYNTTEQRNVVLRYILLNGHTLDLSHFVHQLIEQSPEHETMLMTIAEQLEQKGLERGIKQGIELGREEGIELGREKGKVETARALLRHGVSLDIIVTSTGLSRDKIEMLKHZ

SEQ ID NO: 3809 - protein, 2400 aa, Photorhabdus luminescens
TKGLFMGKSSNRSAEYFFTGNYFADDNDNDIEAIGFGGYIYACGGNDHITLGSIAAKVYTGTGNDTVVGGAAYLSVEDSTGNLTVKGGAGYVDIDKDGDGDISFFGAAGGVVMDHTGHHGDLDFTGTAIYNEMNRDGLTGNMIFEGSGGYNKLWHETNQGNLYFNGAGAGNKIDRTWYDNYNGSRGDVTFNGAGAANSISSRIESGDIVFNGAGADNHIIRRGKEGNIILHGAGALNRIKRIRQKEDIYAQTRGDISFEGLGGYNKIYSDVAHGNIHFSGAGAYNEISRIGMNDDFRDEALEYTQVQDIILTTATMGGSWIQKNQQVTGIKSTTEPDTYLFAFVDEMYTKISKIQLQNDPETGKLNYYATSWYKEGNYLNGLASTEISSGNGFVNTNTNDAYRLFNLMIEHHQPITIHAVGEGLSENEWVICAGGVIVRAEDITLFEAKMGGYAIFSDRQKVDVAAMRSNRQPNTYVYAKYLESCTKVVVVKLENDPVTQELKYFASAWYKAGDHTGNLANEDISLANGYRAINAGGCTLSQLQYSLNTTIRRASDRLAHTEEYRQQELVNSFARNGESSGDIQFSGAGGGNIIISSVTQGNVNFNGAGAANVLVHQSQRGEMDVNAGGVANVVVRVGDGRFLAHLLAVGNISIHKGNGNSRVVMLGGYNTHTQIGKGRASWLGAGGFNVMTQKGSGRVSSVLVGGANVLTKLGAGDLVSGMLGGANVITHITDDAEMSNTRAIALGGANVLTRKGHGDVLAVMGGGANVLTHIGNGNTTGVMLGGANILTKIGDGDTTGTLFGVGNVLTHVGSGQTLAVMGAAGNLLTRVGDGVVIAAMIGAGNLFTHVGKGDIWALMGGAVNIFTKVGDGNALALMIAAGNVFTHIGDGTSVALMLAKGNVATKVGNGMTLAAMIGGANIFTHVGNGNTFVAMIGGANVLTKVGNDLTAALMVGKANIYSHVGNGTSIGLFAGELNVMTKVGDGTTLAAMFGQANIMTHVGNGLTGVLALGEANVVTKTGNDFMGVVAGAKANVITHVGNSMTAGVLLGEGNILTKVGEGTTVGLLVSNVGNVMTHVGHGTTVGFAKGKANIITKVGNGTGVNAVWGEANILTQVGSGDRYNFAKGQANIITKVGDGQEVTIVQGDANIITHVGHGNDYTGAWGKANVITKVGDGRNVVLAKGKANIVTQVGNGDSFNALWSEGNVVTKVGDGMQVTVAKGKANITTTVGNGLNVTATHGDLNVNTKVGEGVSVNVAWGNFNVNTEVGNGLNVAVMKGKNNTNIHIGDGLGMNASYAHNNVAIKIGNGDFYSFSVAESNTQSNRLSSFFEQIKQTALGVGGSQAINYLVQGGEANTSGMHKGRGAIHLAEVSAIDGFKIDEIAPVSSDLSGRLRGSVTAVETPELGSIHDSLNINESNAPGQEANLIINGNFEQVNYGWLTTNGIEASHSAGTYGLDNKGHGERVSELDADVNTTIYQDLQNLFEGEVISLSFDFANRHNAYLTNNGMDVFWNGERVFSTSGDVAGWQNKTLALTAKTGSNRIEFKGTGLNDGVGYILDNIVAKSESSLPAKSVIEQAKQDNAAQNALSDKDRAEEDRRLLEQEKEQQLAAIAGMQTQLESTDQAALNTNGQAQRDAVKEESHAVTDELLSMTQGLDALNDVDNYHGKSGNQWRNQFAAGLLNNVQSQWERTKSTTQEELFNAQQNVTDNQQQVKKAIAQSEAGVAKSEQHRIGVQQDVIDAYKRINLKAVQLQQQRAEKAKNEANVAYQEAENRGKQDIAVAEDKVVQAQTNAKEAKQRDNAKPQRVGALGSGLSGEAYQSTAIVETSSYVNPEFVVQADGRFSAGLMEEDLAVLKEAKNRINQLPVNKLALLDKNLLTTSSQHRGAIKGDVLQKIDNKIFDLIANGKALEAYSFHFSQDGNVLEKISKIIPEIGSVLLTKGDTAESKKFMQGLCFALSARYLMEERVQGSGGGKAYMLWLKDTVKAYNDKSVNKKADINAIESALLIQYRRQNIGLVIEDLLSMQYSQSMDSSTPEAYRKANAAYGGKLKANGLAGPNINNALNYSVEGYESVMDKLRHVRKSTYISFMSEEHAMSVVVHKKLNQTVWSFYDPNYGGKSFANYNDFRRFMDTFHKGFITSYKFQASKESGQSFYIHFNKFEEGTIARYDGVWKTSRDGEQNYVLRALKEQGTVFNLGSNVTGRVIDYRKGDITLEVTAKQGKQTKKVLVDVESNNFKQAASFVQSNINKVLSYPAANRLILKVPVEGDAASPLLEKWSSSDAIKNKNAEAWEQVTVTPQTDDRTTRFSHQVIIQMEDDPVVAKAAANLAGKHPDSSVVVQLDADGKYRVVYGDSARLSGKLTRILDKKLTRSLFQEQSFGVHQKQLRGGNRLWTTZ

SEQ ID NO: 3810 - protein, 295 aa, Photorhabdus luminescens; identical to SEQ ID NO: 1209

SEQ ID NO: 3811 - protein, 1044 aa, Photorhabdus luminescens
IEEAITESFLLRRRFFNDGLSRIRVKLRWQIVGHGRDTSAQNNIRLSGYTADELAVRLKQFSHDLKPVGKLDHISLVGCSLISDDKRDGFARRFITALDKQGIRSHVSARRSEVAIDATGRKLTRDANNQWVNNLPDNKIVFEWNKQGELTPRTERVIRGITESDITLAKVGYTGADVVTRGAVADYRYPFTAPKKRENTIQIDANNKSNNQLSYSGNIQVNVGEGEFTALNWGTSNVGIKVGNGGFKSLAFGDNNVMVHLGDGDSKHSFDIRGYQALEGAQMFIGNRNVSFNQGSSNDLIVMMDKSMPTPPLVNPFDGVMHVTGVLQSIAHFGEERDGLIAQDQQWTLTGASKFVRDMSGLDQTSSVNYKTLVELDLQHERSSRGVKRDIETTLNKKYHQWLTCNVTDMGTMSRANRFRQANEKLAFNFAVGGQGADIQVTAGNWNFMFGDHIQSILDTNLGSLFGLMTQQYSATGMVKTTFTYHPQDLPRQLKNKLLGRLASVNEETTLADIFGVNYTAEGQMVSCTGEPVDGEAILREMLAVIAEFSGDQLKAFTNPKKLLDGLKAGMDMGADGIRSFAESHGLQGKAPDENHTPESPVSVDGKRAQADDKAKPAFGFNSLNLPNLFATMFSKDKQTEMHSLVTHLKENLTADLLNMEEKTFDFLRNSGHLHDDGDIHISLGNYNFNWGGDGKDLGAYLGDNNNFWGGRGDDVYYSIGTSNLFTGGEGDDLGVLMGRENWMFGGHGDDTAVVAGRINHVFMGEGNDQAFVFGEGGFIEAGNGQDYVVASGNYNRVDSGEGQDYVVTIGNNNQIELGEGNDFARVFGNDNRIDGYFGNDAIKLMGYHAVINGGEGDDHLIAAAISKFSEFNGGDGQDLLVLGGYQNRFHGGSGADSFMVSGEVIDTSVNDISAEDMILLNNVDWRNLWLQRSGYDLVLSVKRQTRDNDAQGVFESVGSVTFDNYFNGNRAKLVTQIGDKNALGKREFTALSDNVVDSLIQAMSSFAPTVGDNGFIEGLESQAKVAITTAWTDVTIGKGKFAZ

SEQ ID NO: 3812 - protein, 595 aa, Photorhabdus luminescens
MTKVRQLWPSLKRLLVYGKNYRKPLGLAVLMLWGAAIAEVSGPVLISYFIDNMVATGNMPTRVVIGLAITFIVLQLITAALHYFQALLFNQVSVDVVQQLRTDVMNAALRQPLSAFDNQPVGQLISRVTNDTEVIKDLYVNVVPSVFRSMALIGTMLIAMFMLEWRMALIAILIFPVVLIVMAIYQHFSTPIVRRVRSYLADINDEFNEVINGMSVIQQFRQQARFGERMLLTNRAHYQARMQALRLDGLLLRPLLSLLSAMVLCGLIVLFGISGPGAIGIGVLYAFINYLGRLNEPLIELTSQQSILQQAVVSGERIFELMDSPQQGYGMDGQPLSSGRIDIENVSFSYRHGKIVLQDINLQVPAHGFVALVGHTGSGKSTLANLLMGYYPWQKGEIYLDGRPVSSLSHSVLRNGVAIVQQDPVVLADSFFDNITLGRNISEEKVWQVLETVQLAELVRTLPDGLHTILGEQGNTLSAGQKQLLAMARVLVQTPQILILDEATANIDSGTEQAVQQALRLIRQQTTLIVIAHRLSTIVEADTILVLHRGAVVEQGCHQQLFVSRGRYYQMYQLQQVGETLNECGTISEKEVLIZ

SEQ ID NO: 3813 - protein, 270 aa, Photorhabdus luminescens
KKTILIMKLVNPLNYHMQIPENPLSPIPVVLIHGLFGDLNNLGVLARDLQQYYPVIQVDVRNHGLSPRANNMDYHDMAQDVISLLDHLQIQSAIIIGHSMGGKIAMAMTALAPERIEKIVLIDIAPVAYQVHRHDQIFTALNKVTAAGVKSRQDAAKIMRENIQEEGVIQFLLKSFHQGEWKFNLPVLINQYEKIIGWQEIPTWPRPALFIRGGLSSYIQEEYRNNITRQFPQAKAWVIAGCDHWVHAEKPDAVLKAIHHFLNTNTELMZ

SEQ ID NO: 3814 - protein, 418 aa, Photorhabdus luminescens
VKKNLLKSLYFQVLLAITIGILLGHFYPELGTEMKPLGDGFVKLIKMVIAPVIFCTVVTGIAGMESMKAVGKTGAIALVYFEIVSTIALIIGLIVVNVMQPGAGMNIDPSTLDVKAVSLYAEKAAEQGIIAFLLDVIPASVIGAFASGNILQVLLFAVLFGFALHRLGEKGKPIFNIIDGFSHVIFGIINMIMRLAPLGAFGAMAFTIGKYGIGTLVQLGQLIVCFYITCILFVIFVLGTIAKATGFSIFRFINYIKEELLIVLGTSSSESALPRMLDKMEKAGCQKSVVGLVIPTGYSFNLDGTSIYLTMAAVFIAQATNTHMDIVHQITLLVVLLLSSKGAAGVTGSGFIVLAATISAVGHLPLAGLALILGIDRFMSEARALTNLIGNGVATIVVAKRCRQLDEGKLNEVLNAKZ

SEQ ID NO: 3815 - protein, 255 aa, Photorhabdus luminescens
LERCMKYRLGGIALAAALLVGCANSSDTVEQERSDLLEGFNRTMFNFNYDVLDPYVLRPVAVAWRDYVPMPARNGLGNFLSNLEEPASMVNSFLRGNPYQGMKHFNRFFLNTILGMGGLIDVATMANPKLAKEEPKRFGSTLGYHKVGYGPYVVLPGYGNFTLRDEGGNWADMTYPMLSYLTIWMSAGKWAFEGIETRARLLDSDGLLKNSSDPYLMMREAYFQSHDFMASGGKLKATENPNAEALQGDLDSIDZ

SEQ ID NO: 3816 - protein, 448 aa, Photorhabdus luminescens
LVMNQKNLFTRSALAVAVAIISSNAGAAGFQLNEFSTSALGRAFSGEGVVADNAAVGSRNPAAMTLFDRPSFSIGAVYINPDVDITGKSPVTGKSTNAKNIAPTAWIPNIHFIMPIDDQWFVGTSVTTNFGLATDFSNNYEAGPIGGKTDLTTLNFNLSGAYRLNDHFSFGLGLNAVYADAKIVRHAGALSYMLDQHPKMPKGLVKPTDEVANLEGKDWGYGWNAGIMYEVDENNRYSLTYRSKVKIKFKDGDYKNDVPVQLGQMLQKAGVNLPATGGQTIGGRLDLNLPDIWEVSGYNRVAPKWAIHYSLAYAGWSEFNELKGTRKKDGAVLFSKHEGFKDAYRIALGTTYYHDDNWTFRTGIAFDDSPIPAENRSISIPDQDRFWLSAGATYAFNKDASVDVGVSYMHGQKVTVKEKLSEALPNAYEFEAKGSAWLYGVNFNYAFZ

SEQ ID NO: 3817 - protein, 437 aa, Photorhabdus luminescens
MSRPLTKVTQQGDRIAIVSGLRIPFAKQATSYHDIPAVDLGKSVVSELVTRSGLLPEKIDQLVFGQVVQMPEAPNIAREIVLGAGLSVSTDAYSVSRACATSFQAIANVAESIMAGTVNIGIAGGADSSSVLPIGVTKSLARTLVEMNKAKTLSQRLKLLSRLKFRDLLPVSPAVAEYSTGLRMGDTAEQMAKTYRISREDQDALAHRSHILAAKAWEQGLLVDEVMTAHFPPYREALLEDNNIRKNSVLTSYAKLRPAFDRKYGTVTAANSTPLTDGAAAVILMRESVAKALGTKPLGYLRSYAFSAIDVWQDMLLGPSYATPIALDRAGITLKDLTLIDMHEAFAAQTLANLKMFASDEFARNKLGRAQAIGEVDMDKFNVLGGSIAYGHPFAATGARMVTQVLNELRRRGGGLGLTTACAAGGLGTAMVLEVEZ

SEQ ID NO: 3818 - protein, 744 aa, Photorhabdus luminescens
LCCWRVGHSYGIGGGIMTQAQHDAAPITTGTNQTASVFSFDVRPDKIGIITINVPGEKVNTLKAEFVDQFLNVFKQAQQSSGLKGLILISGKPDTFIAGADISMIAGCKTKEDARDLAEKGQKLFSQIANYPLPVVAAIHGACLGGGLELALACHWRVCSQDDKTRLGLPEVQLGLLPGSGGTQRLPRLIGVSSALDIMLTGKQLRAKQALRLGLVDDAVPLDILLDIAIEKVKKGIPVRKPLPWQQRLLVGPVGRYFLFNIVRKKTLAKTRGHYPAPERIIEVVKEGLEKGMSQGLRAEAVAFGELAMTRESAALRNLFFAATSLKNETGSSEKPAKIKHVGILGGGLMGGGIANVTATRGKLPVRIKDINEKGISQVLKYTWDLLSKRVKQKRLRPAERAQQMMLISGTTDYRGFAQTDIVVEAVFEDLSLKQKMVAEIETNAKPETIFASNTSSLPIHQIAEKAQRPEQVIGLHYFSPVDKMPLVEVIPHQGTSEKTIATAVSLAKKQGKTAIVVGDKAGFYVNRILVPYISEAAHCLVAGEPIDHIDGALVNFGFPVGPINLLDEVGIDVGTKIMPVLVEQLGPRFAAPESLDAVLKDGRKGRKNGRGFYLYAPGPRKFWQFGKRDKKVDSSVYTLLNITPESHMLSSEIAQRCVMLMLNEAVRCLDEGIIRSPRDGDIGAVFGIGFPPFFGGPFRYIDSLGCARVVEILRRLESQYGDRFVPCECLVNMAEQNKSFYPZ

SEQ ID NO: 3819 - protein, 161 aa, Photorhabdus luminescens
MQIFIMRHGDAALEAISDAARQLTPRGCDESQKMACWLAQQKHQIDLVLVSPYIRAEQTLQIVRKSLSLPDGEEVLLGLTPSGDATTVSSYLQFLAEQGHNAILVVSHLPLVSYLVAELCPAETPPMFATSAMICVDLNSQTGKGTLVWQVSPSQLAAKAZ

SEQ ID NO: 3820 - protein, 418 aa, Photorhabdus luminescens
LIMVIELRDTDIIWRNARLATMDPAVNAAYGLLKEYDLVVRDDKILAILPTAALQTSRCQVIDVQQRLITPGLIDCHTHLVFGGNRAYEWEQRLNGMSYAELSAQGGGINATVSATRASSHEQLERSAQQRLTAFMAEGVTTIEIKSGYGLNLENEEKLLQVVQHLAQHNPIEISPTLLAAHTCPPEYKHNPDAYMDLICEDILPQLWQKGLFEAVDVFCESVGFNLAQTERLFQAAQRWNIPVKGHVEQLSHLGGSELVARYHGLSVDHIEYLDQAGVESLSHSGTVAVLLPGAFYFLQETRCPPIDLLRQFNVPIAVSTDFNPGTSPFASLRMAMNMACVQFGLTPEEVWLGVTRHAARALGREPRHGQLRAGAYADFVVWDAENPVDIFYELGHNPLNTRVFRGVMTHSSIYNRZ

SEQ ID NO: 3821 - protein, 319 aa, Photorhabdus luminescens
MNLWHATSPTIWQGRNDLAEADNALRLFQTVKLSPYFTPEEFSHYVALLGFECDEGVKRNQGRPGANQGPDYLRQSLANMASHKGHDKLVDLGSIRANPNQLSEAQQALSDAVTQCQCQNVRTLVLGGGHETAFAHGVGIYDAFPHQRVGIINFDAHLDLRRSPQPTSGTPFRQLAEYCQQHQRLFHYTCIGASLASNTQALVDEANRLNATIIWDNQCRETMLDKVQQQIQDILQQVDLIYMTIDLDVLPAYQMPAVSAPAALGLPLERLLQLIQPICQSGKLQAADLVELNPLFDIQGIGGRAAARLAWQLAHWWYZ

SEQ ID NO: 3822 - protein, 244 aa, Photorhabdus luminescens
VTTHSSGSFAKPVPLYAKVKQSIIEKIYTGEWKSNDRVPSEAELVKQFNCSRMTANRALRELTAEGLLVRLQGVGSFVAEPKGQSALFEIHSIADEISARSHQHRCKILKLSELDADVKQAAELDIIVGTPIYHSVIVHYENDVPVQIEDRYVNAQAVPDYLQQDFTKLTPHDYLSMIAPLTEGEHIVEAIAGDPRSCKLLQIESGAPCLLISRRTWSIHYIVSSASLLFPGNRYKLKGRFNSZ

SEQ ID NO: 3823 - protein, 590 aa, Photorhabdus luminescens
VRLFSQLSWYFRSEWRRYLGAVTLLIIISILLLIPPYLVGVIVDGISTASMSFYQLMVWAGVILVIALIVYILRYIWRLWLFGASYQLAVKLRNNFYQQLSRQSPEFYLRHRTGDLMARATNDVDRVVFAAGEGVLTLVDSLVMGCAVLIMMSIQISWQLTLLSLLPMPIMAIIIKRYGDQLHRRFKSAQGAFSALNNQAQESLTSIRMIKAFGLEDLQSNQFEQVAVEAGRKNMYVARVDARFDPTIFIAIGMSNLLAIGGGGWMVLNGVLTLGELTSFVMYLGLMIWPMLALAWMFNIVERGSAAYSRIRSLLQEPPVIKDGIGNLLPERGILDVNIKAFNYPQSNKTVLSQINFQLLPGQLLGICGSTGSGKSTLLALIQRQFDVTDGEILFQSLKIADIRLDEWRARFAVVNQTPFLFSDTVARNIALGRPDATQEQIEEVARLANVHEDILRLPEGYQTEVGERGVMLSGGQKQRISIARALLLDAEILILDDALSAVDGQTEYNILQNLSQWRQQRTVIISAHRLSALTEADNILVMQQGSVIHQGRHPQLAEQPGWYRDMYYYQQLEAELDGEETAEGDKDDZ

SEQ ID NO: 3824 - protein, 560 aa, Photorhabdus luminescens
VTAQNSKFRSVGIRAPRGTQLTAKSWLTEAPLRMLMNNLDPEVAENSYELVVYGGIGRAARNWECYDKIIETLKELEDDETLLIQSGKPVGVFKTHSNAPRVLIANSNLVPHWATWEHFNELDAKGLAMYGQMTAGSWIYIGSQGIVQGTYETFVEAGRQHYNGNLQGRWVLTAGLGGMGGAQPLAATLAGACSLNIECQQSRIDFRLRTGYVDEQAKDLDDALTRIEKYTQEGKAISIALCGNAAEILPELVRRGVRPDLVTDQTSAHDPLNGYLPKNWSWEEYRQRAISAPEEVIKAAKSSMVEHVKAMLIFQQQGIPVFDYGNNIRQMAYEVGVENAFDFPGFVPTYIRPLFCRGIGPFRWVALSGDPQDIYKTDAKVKELLPDDQHLHHWLDMARERISFQGLPARICWVGLGQRAKLGLAFNEMVRSGELSAPIVIGRDHLDSGSVASPNRETESMCDGSDAVSDWPLLNALLNTASGATWVSLHHGGGVGMGFSQHAGMVIVCDGTDEAAERIARVLHNDPATGVMRHADAGYEIAIHCAKEQGLDLPMLNTKZ

SEQ ID NO: 3825 - protein, 515 aa, Photorhabdus luminescens
MKQLTIYPGKLTLDELRQVYLQPVKITLDSQIFPAIERSVECVNAILAENRTAYGINTGFGLLASTRIEEDNLEKLQRSLVVSHAAGVGKALDDNMTRLIMVLKINSLSRGYSGIRLAVIQALIALVNAEIYPHIPCKGSVGASGDLAPLAHMSLLLLGEGQARYQGEWLPAKEALAKANLQPITLAAKEGLALLNGTQVSTAFALRGLFEAEDLLAAAIVCGSLSVEAALGSRKPFDARVHVVRGQQGQIDVAALYRHVLEESSELSDSHINCPKVQDPYSLRCQPQVMGACLTQLRHAADVILTEANAVSDNPLVFAEQGEVISGGNFHAEPVAMASDNLALVLAEIGALSERRIALLMDSHMSQLPPFLVENGGVNSGFMIAQVTAAALASENKALAHPASVDSLPTSANQEDHVSMAPAAGRRLWEMAENTRGILAIEWLSACQGIDFRNGLKSSPILEEARVILRAKVDYYDQDRFFAPDIDAAVKLLAEQHLSSLLPSGQILQRKNNRZ

SEQ ID NO: 3826 - protein, 465 aa, Photorhabdus luminescens
MQASLQLERGLNARHIRFMALGSAIGTGLFYGSAEAINMAGPAVLLAYLVGGAAVFMVMRALGEMAVHRPDAGSFASYAHQYLGPLPGFITGWTYTFEMIIVCLADVTAFGIYMGLWYPEVPRWIWVLSIIFIIGALNLCKVKVFGEMEFWLSILKVAAISAMIIAGTGIILFGFSGHFQATGVQNLWQHGGFMPNGLGGIIESLAVVMFAFGGIEIIGITSSEAKNPAKVIPQAINSIPFRILLFYVLTIFVLMAIYPWNSIGQEGSPFVAIFQGLGIGSAANILNIVVITAAISAINSDIFGAGRMMYGMAEKGLAHKKFMHLSRNGVPWVTIMVMTLALLCAVVLNYLLPKQVFVIVASIATFATVWVWLMILLSQFAMRRKMSPGEAQKLQFPVPMWPVAPILTIVFMIFIIAVLSYFPATRIAFYVGGAWIALLTSAYYLWIRKNVIIVSAQSAKETRCZ

SEQ ID NO: 3827 - protein, 315 aa, Photorhabdus luminescens
LEALLDKIFIDEAVAELYTIQDMLRWSVSRFNAANIYYGHGTDNPWDEALQLVLPSLFLPLDIPQEMLTTRLTSTERHRIVERVLRRINERIPVAYLTNRAWFCGHEFYVDERVLVPRSPIGELINNEFAGLIPEQPANILDLCTGSGCIAIACAYAFPEAEIDAVDISADVLAVTEQNIQNHSLDHRVIPIRSDLFRDMPPVKYDLIVTNPPYVDAEDMSDLPEEFRREPELGLAAGSDGLKLARRILATAPNFLTERGVLICEVGNSMVHLIEQYPDVPFTWLEFEYGGDGVFMLTRQQLIEHHEHFRLFKDZ

SEQ ID NO: 3828 - protein, 362 aa, Photorhabdus luminescens
MAGNSIGQFFRVTTFGESHGLALGCIVDGVPPGIAITEADLQVDLDRRRPGTSRYTTQRREPDQVRILSGVFEGVTTGTSIGLLIENTDQRSQDYSAIKDVFRPGHADYTYEQKYGIRDYRGGGRSSARETAMRVAAGAIAKKYLLDKYGIRVRACLTQMGNIHCQLKDWELVEQNPFFSPDETKLEQLDALMRELKKAGDSIGAKVTVVAENVPAGLGEPVFDRLDADIAHALMSINAVKGVEIGDGFGVINLRGSENRDEITARGFTSNHAGGILGGISSSQPIVAHIALKPTSSIMVPGKTINRQGEEVEMVTRGRHDPCVGIRAVPIAEAMMAIVLMDHLLRQRAQCADVESSLPRWZ

SEQ ID NO: 3829 - protein, 268 aa, Photorhabdus luminescens
MDWLLSLGAEVYVLLFLVAVMAGFIDSISGGGGLLTIPALLSVGVSPVQALATNKLQAVGGSFSASLYFVRYGEVDIKSQRFAILMTLLGSMAGAIIVQFIKPDFLCQLLPVLVIIIGLYFLLTPAIGMEDRHRRLTPVVFALLVGSGLGLYDGIFGPGVGSFYALAYVVLCGYNLAKSTAHAKVLNFASNIGSLALFILGGQVLWVLGLVMLAGQVIGARLGASLVLTHGQKLIRPMIVIISFLMSIKLLNDNHGDTIRSWLAFYFZ

SEQ ID NO: 3830 - protein, 681 aa, Photorhabdus luminescens
VKNSAICTATLSWNDQGTPISTQFDDVYFSNQDGLEETRYVFLNGNCFPQRFCTHSRSSCVIAETGFGTGLNFLTLWQAFDAFRQQNPDAPLKRLHFISFEKYPLKTNDLKAAHQRWPELEIFSQQLYQQWPQPLAGCHRLIMANGAVTLDLWFGDVNDLLPTMDSSLHGKIDAWFLDGFAPAKNPQMWSEQLFTAMAQFAHPEGTFATFTSAGIVRRGLQQAGFNVSKIKGFGRKREMLAGVLATQKYQPLPAPWFARPSASHNDDIAIIGGGIAGILTALALLRRGAQVTLYCQDVAPAQGASGNRQGALYPLLNGSNNGLEKFFTSAFTFARRQYEQFSAQGIDFDHQWCGVSQLAYDEKSSKKIEKMLATEWPNELAIGMNCHQLSEKCGLDIHHHGIHYPQGGWLCPAELTKAATELAQQQGMLCCFNHQVTALSHNQHGWQLHLMHQGQSLNAQHKTVVIANGHHLPQFEQTEKLPVTAVRGQVSHIPTTTDLSQLQNVLCYDGYMTPANPANQHHCIGASYQRHRLDNEYSETEQQENRDRLLKCLSDAEWVNQVDVSAKQSRQGIRCVIRDHMPMVGNVPDLNKIMTDYQDLPEKIRTGSPITDAPCYSNLFVIGALGSRGLCSAPLSAEILAGQIFDEPLPLDNEILATLHPNRFWIKKLLKGRKLKIEKPZ

SEQ ID NO: 3831 - protein, 405 aa, Photorhabdus luminescens
MKRVVITGLGIVSSIGNNQKEVLASLKEGRSGITFSEKFKEIGMRSHVWGNVKLDTSGLIDRKIQRFMSDASVYAYLAMEEAIKDSGLADDQVSNIRSGLVVGSGGGSPHNQVAGADGMRTRGLRGVGPYMVTRSMASGVSACLATPFKIKGVNYSISSACSTSAHCIGHAAELIQLGKQDIVFAGGGEELCWEMSCEFDAMGALSTKYNEMPEKASRTYDKSRDGFVIAGGGGIVVVEELEHALARGAHIYAEIVGYGATSDGADMVVPSGEGAVRCMNMALQDVKGSIDYVNTHGTSTPAGDVKELEAIREVFGDTTPAISATKAMTGHSLGAAGVHEAIYSLLMLEHGFIAPSINIEALDDKAVGMNIITKPTEQKLNTVMSNSFGFGGTNASLVMSKYSAZ

SEQ ID NO: 3832 - protein, 507 aa, Photorhabdus luminescens
METWMYLSQGFEVAMVPQNLIIALIGCFVGTIVGLLPGLGPINGVAILLPLAFALKLPAESALILLATVYIGCEYGGRISSILLNVPGDAAAIMTALDGYPMAKQGRAGVALSISAVSSFCGSLLAIFGIILFAPLLAQWSLAFGPAEYFALMVFAIACLGSMMSQNPLKSLLAALIGLGLATVGVDANTGVYRFTFDNVHLSDGIQFIVVVIGLFSVSEILLMLESTSAGKTIIRKTGRLLFNRKEAAECAMPTLRSSFIGFFVGILPGAGATIASAITYMTEKKLSGNSDSFGKGDIRGVAAPEAANNASACGSFIPMLTLGVPGSGTTAVMMGALTLYNITPGPGMFTEQPDIVWGLIAALLIANIILLIMNIPMIGLFTRMLTIPLWFLVPAIATVSAVGVYAIHSTTFDLLLMVGLGIFGYILRKMNFPMSPLILGFVLGEMLEQNLRRALSISNGEFGILWSSTITQSLLILAALVLIIPPILRIIRKRRIQQMATENKTZ

SEQ ID NO: 3833 - protein, 348 aa, Photorhabdus luminescens
LSQPGLFVVIISYKGIDESKQMKTITIKMLAATALLFGTSSVFAASAPNRTECIAPAKPGGGFDLTCKLVQVSLLDTKEISKPMRVTFMPGGVGAVAYNAIVAQRPTEAGTIVAFSGGSLLNLSQGKFGRYNVNDVRWLASVGTDYGMIAVRADSPYRTLNDLMNAFKDNPSSIVFGAGASIGSQDWMKTALLAKEVGIDPHKMRYVAFEGGGEPITALLGNHIQAVSGDLSEMVPYLNGDKIRVLAVYADKRLDGDLANIPTAKEQGYDLIWPIIRGFYMGPKVSDEEYQWWVDAFNKLQQTDAFKKQRDIRGLFEFNMTGKELDSYVKKQVEQYREQARAFGLAKZ

SEQ ID NO: 3834 - protein, 351 aa, Photorhabdus luminescens
MSHSWTTKAIREIQADHQRSSDTHLIRLNLPVFPGIHLYLKDESTHPTGSLKHRLARSLFLYALSNSWIKEGTPVIESSSGSTAVSEAYFARLLGLPFIAVMPSYTAKRKIQEIEFYGGKCHFVNHSAQIYDESERLAKELNGHYMDQFTYAERATDWRGNNNIAESIFRQMQMEPFPEPDYIVMSAGTGGTSATLGRYIRYQGHNTKLIVVDPENSIFYDYYRQNCCDIRGNYSSKIEGIGRPRAEPSFIPSVIDDMIQIPDCASIATIYWLEKLLGRKVGASTGTNVWGALLLANQMHERGEQGAIVTLLCDSGERYLDTYYNPDWVKNNIGDISPYLKQLPNFRSYKZ

SEQ ID NO: 3835 - protein, 222 aa, Photorhabdus luminescens
IEEMMRKLILCSAMGSAMAFTLAGCKTELSTSVSVNQLLSEQVKTVTSDLLVEVSACGDYKDSRQSSKSLLDTQEKVPAIFANAEYVECFRKSMDSFAHFKVPVSVGNSSITGSTKGIHLYGNGADILVISVPKAIKEKINQIDSSMASKTKISINIKNDTGEVLKMTGLSAFLNDKEPMVISNFSLKVGSEIKLTLSNVSVASALDERFDFTPVLMAISEZ

SEQ ID NO: 3836 - protein, 226 aa, Photorhabdus luminescens
MRLLLVEDHPELLHWLQKALSSSGFAVDVASDGIVADQLLQTENYALLILDVSLPRLDGLSLLVRLRKRGQNLPVLLLTAKTDVSERVKGLNSGADDYLTKPFDLQELEARIRALLRRSAGVLQETLTFGSLVYQDDGYFVLNDEPLALTPRELSVLTTLFHRRGRPVSKQQLFEQVFALSDEANPQSIELYVHRIRKKLSGSNVGISTLRGLGYRLERQKDDMVZ

SEQ ID NO: 3837 - protein, 474 aa, Photorhabdus luminescens
MTWFKVPNSLFHQLLLFFGVPLFVLGCLSVGTHYFSAENAATLAYDRTLLASARTVAERLTVKNNQLIVDVPYVVLDSFERNMNDRLFYQVLSPEGEIISGYDDLPLIPKDTLRSNLYTALVYFYDAEYHGRPIRVAALYQPINEGGMMGMALILVAETVASRHYLAQQLLISSLMSQGTVVGLTLILAYFLLKQLLKPLHKLSGVMVRRPANDLTPLPDMLPWSELSPLLYAFNRYIERLKLMVSRQERFSADASHQLRTPLTVLKTQVAVALASKDPAQWKESLQAIDSTLDNTISLTDRLLQLSRLKAHEKEAVRDYRPVNLVELLQQACFSRLQQAESKNIDLGYEGENAQWIKGEPVLLTEMCANLLDNAIKYTPEGGIVTARVILNSCKTYCYLEVDDSGPGIAKEDVNLSLMAFNRLDNAAGHEGAGLGLALVKDIGIYHGTHPQLLPSETLGGLLVRIPFRLSDDZ

SEQ ID NO: 3838 - protein, 296 aa, Photorhabdus luminescens
MNIIFPFLAVLIWSINAVVSKASATAIDPAAISFYRWFLAFLTLTPFVVLSVIRRWKTICQYWWKLLILGALGMVLYQSLAYYAAHSISATFMGILSSLIPLLTVIISIFVLRVVPTVGLALGTVLSLSGLIWLVSAGDPISLLQHGLGRGELMMLLASISYALYGVLTKHWSIPLPNWQSLYVQITFGVLLLLPNFLLTKDVQLNASNISLVLFAGIPASIIAPYLWIQGVIKLGANTTTIFMNLTPIFTAIIAILVLHEEMHSYHLIGGSITLLGVILAQQLRTPLIRKTSGNZ

SEQ ID NO: 3839 - protein, 376 aa, Photorhabdus luminescens
VKILVDENMPYADQLFQQLGDVQAIPGRPVPEGVLDHADAFMVRSVTKVNEELLKGRAVKFIGTATAGTDHVDQSWLSQAGIGFSAAPGCNAIAVVEYVFSALMLLAERDNFELKDKVVGIVGVGNVGSRLAERLAVLGIRTLLCDPPRADRGDAGEFWSLEKLVKEADILTFHTPLNKSGPYKTHHLVDVELLSVLPDNRILINASRGEVIDNQALLTALKCGKKLRVVLDVWEPEPDLSLPLLELVDIGTPHIAGYTLEGKARGTTQVFEAYCEFLGQPRKVALSDLLPEPDFSRVTLHGNVTQSTLKRLMHLVYDVRRDDTPLRQVAGQKGQFDYLRKNYLERREWSSLTVCCDNRESAELLAALGFSTELIZ

SEQ ID NO: 3840 - protein, 337 aa, Photorhabdus luminescens
MSEGWNIALLGATGAVGEAILALLQERQFPVGELYPLASERSAGESLRFNGKNFVVGDAADFDWSQVQLAFFVAGLEATAQYVEKATEEGCLVIDSSGLFAMEPDVPLVVPGVNPHVLADYRNRNIIALADSMTSQVLTAIKPLVDAAGIARLHLTNLFSVSVHGKAAVDELAGQSARLLNGIPPEPGHFSKQLAFNLLPLPTEAEGSVREERLLVDQIRKILQDEGLPISVSCVQSSVFYGNAQVVHLETLRPVGVEEVREELERMVDINVADEGDYPTPVTEASGNDVLSIGCLRHDYGMPEILQFWSVADNIRFGGALMAVETAEKLIQEQFYZ

SEQ ID NO: 3841 - protein, 270 aa, Photorhabdus luminescens
VPGSKMKIALGIEYDGSRYYGWQRQQEVKSVQGCLEEALSKVADEPISVFCAGRTDAGVHATGQVVHFETSVQRKDAAWTMGVNVHLPPDIAVRWVKTVDEGFHARFSATARRYRYIIFNHRYRPAVLANGVTHFHYPLDEKRMHQAAQCILGENDFTSFRAVQCQSKTPWRNVMHINVNRYGHYVVIDIKANAFVHHMVRNIAGSLMEIGCGNQDINWMAQLLALKDRAKAAATAKAAGLYLVAVDYPVQFDLPCAVMGPLFLADDLIZ

SEQ ID NO: 3842 - protein, 247 aa, Photorhabdus luminescens
FNISSCRHGCFGIVGNIMEFLTHFVDFAKFIIDFILHIDIHLAELVAQYGDWVYGILFLILFCETGLVITPFLPGDSLLFVAGALAALGSNDLNVHIMVALMIIAAIIGDAVNYAIGRIFGERLFTNPNSKIFRRSYLDKTHEFYEKHGGKAIILARFVPIIRTFAPFVAGMGKMSYRRFAAYNVIGALVWVLLFTYSGYIFGDMPMVQQNLKLLIVAIIFISILPGVIEIWRHRRTVMKQKSDNRZ

SEQ ID NO: 3843 - protein, 315 aa, Photorhabdus luminescens
MSWIEKILNKSNITQTRKANIPEGVWTKCDSCSQVLYRAELERNLEVCPKCDHHMRISARTRLATFLDEGATTELGGELEPKDILKFRDSKKYKDRISAAQKQTQEKDALVVMKGTLSGMSVVAAAFEFAFMGGSMASVVGARFVRAVEQALADNCPLICFSSSGGARMQEALMSLMQMAKTSAALAKMQERGLPYISIMTDPTMGGVSASLAMLGDINIAEPKALIGFAGPRVIEQTVREKLPSGFQRSEFLLAKGAIDMIVRRPEMRDTLASLLSKLTHQSQPGTKPIVAEFVAEPADVEADIQISTNKEDAZ

SEQ ID NO: 3844 - protein, 433 aa, Photorhabdus luminescens
MPDTLQIPQATSPLMTWLSYLGNLHTTAIDMGLERVGKLARTLALVNPAPKVITVSGTNGKGTTCCTIESILLAAGLRVGVYSSPHLVRYTERVRIQGKELPEQEFCRVFADIESRRGDISLTYFEYGTLAALQLFKQACLDVVILEVGLGGRLDATNIVDADIAAITSIAIDHIDWLGADREHIGREKAGIFRKDRFAVVGEPDMPSSIAEVAGELGAKLFRCGIDWRFSQQNKNWHWQSDDRLFSNLPLPNVPLMNAATAMGVICCLLRQDDKVSRAINESAIHQGLQNAQLPGRFQIVREKPLLILDVAHNPHAAAYLVQKLAQLPRQPGSRILGVVGMLGDKDIAGTLTCLSQQINEWYCAPLTEQRGADAQTLAQHLGQPRIFTDVESAWHQAMVDADEQDIVVVCGSFHTVVHVMEALDREKGSGKZ

SEQ ID NO: 3845 - protein, 233 aa, Photorhabdus luminescens
MRRAVVVFSGGQDSTTCLIQAINQYDEVHCVTFDYGQRHRAEIDVARNVSHFLGVVAHKVLDVTLLNELALSSLTRDNIPVPDHSESEKSAIPSTFVPGRNILFLTLAAIYAYQVEAEAVITGVCETDFSGYPDCRDEFVKALNKAVSLGIARDIRFETPLMWLNKAETWALSDYYQHLDFVRSQTLTCYNGIQGNGCGTCAACHLRANGLEQYLNAPEKIMTEMKAKTHLVZ

SEQ ID NO: 3846 - protein, 228 aa, Photorhabdus luminescens
VASKFQNRLVGTIVLVALGVIVLPALLDGNKKYNEDKFASIPLVPKPGDEQEIDSISPLNPPILSVPLEDETEALQPETLEQPEIPLVTTPQLAPIVPPAVQPEVKPQPQIKLEPKPDTKPSAPALKSKPDIKSESKPEVKPIETAPQGQAYIVQLGALKNAGKVDEIVARLRLSGYQVYTVPSSPVQGQLTRIYVGPNASKQQLDSALSELKSLTGLQGQVRSYRPZ

SEQ ID NO: 3847 - protein, 506 aa, Photorhabdus luminescens
MCGIVGIVGFTPVNQSIYDALTVLQHRGQDAAGIATIDGNNGFRLRKANGLVRDVFEARHMLRLQGTIGIGHVRYPTAGSSSASEAQPFYVNSPFGITLTHNGNLTNAHELKKKLFENARRHVNTTSDSEILLNVFASELDCSQHYPLVPDNIFAAVAAMHKQVSGAYACIAMIIGHGLVAFRDPHGIRPLVLGKRTLDDGRNEYMVASESVALDTLGFEFLRDVASGEAIYITEQGQLFTRQCAENPSLTPCLFEFVYLARPDSFIDKISVYNARIRMGHKLGAKIAREWEDLHIDVVIPIPETSCDVALEIARILGKPYRQGFVKNRYVGRTFIMPGQQERRKSVRRKLNANRAEFRDKNVLLVDDSIVRGTTSEQIVDMAREAGAKRVYLASAAPEVRFPNVYGIDMPNANELIAHGREVDEIRQLIGADALIFQDLTDLIDAVREENPDVDGFESSVFNGVYVTKDVDQTYLYYLENLRKDDEVKLNNQNEVENLDIYNEGZ

SEQ ID NO: 3848 - protein, 195 aa, Photorhabdus luminescens
MKRLIVGLTGASGAIYGIRLLQVLQPVEGIETHLVISHSARQTLALETDYSLRDVQALADVVYDNRDIAAAISSGSFKTSGMVILPCSMKTLSGIVHSYTDGLVTRAADVVLKESRKLVLGVRETPLHLGHLRLMTQAAEIGAVIMPPVPAFYHQPQQIQDIIDQTVNRVLDQFDIELPHDLFTRWQGAKSVEIZ

SEQ ID NO: 3849 - protein, 305 aa, Photorhabdus luminescens
MRILITGGTGLIGSRLVCQLLSLSHSITILSRSPQKVYSLFSNQAECWTSLKDKTDLNDFDAVINLAGEPIVNKLWTSTQKEKLCQSRWTLTEQLSKLINASQTPPEVFISGSAVGYYGDQNQTIVTEHEPPHDEFTHQLCKQWEQLALQAASDKTRVCLLRTGVVLAKNGGALKKMLPLFRLGLGGPMGSGKQYLPWIHIDDMVNGIYYLLMTPGLSGPFNMTAPYPVHNDQFAATLGEVLHRPAIIRTPAFVLKLLMGEAAALVLGGQQAIPHNLEQAGFGFRYFQLKEAFQDLLDAKSQRFZ

SEQ ID NO: 3850 - protein, 207 aa, Photorhabdus luminescens
MIDLYYAPTPNGHKITLFLEEAGLSYTIHRIDISAGDQFKPEFLAISPNNKIPAIVDQQPIDGGKPIAIFESGAILTYLAEKTGKLLSKDMRERVQSLQWLFWQVGGFGPMLGQNHHFSHFAPEKVPYAINRYQEETKRLYQVLNTQLEKTPYLSGQEYSIADISTYPWVRAYERQSIDLNDYPAVKKWFDAISQRPATQIAYSKIZ

SEQ ID NO: 3851 - protein, 533 aa, Photorhabdus luminescens
PVFSSRKFKKFTAKNTITSWRKNMPDFSIQRANTRIDIPQNELHQTTTTDKTCHCCEPLLNNTIDNPLTAPTSVITRWNEKSVATNKQIEANISRLAGESTAAHKTVNSLLSNLVKLFVRAEGNELTAITKMLNAYTGDKPGFSIVGQLGAGGFTRIISEARQNGASSDRANTEPLTLREKATAYYDLTNSAYFRDTLEKIYSSPELKSEFKDIIDIGYLESKNFAPARGSTKEKPLPDQLALYTFKNENQFNASENPELYQVTKQVNGQEVISNPALAGNSLTKVQNDFRAPAPDKDSVWSAAASLEADNRLTNRELAFASLNPRNRLDRTDYQFGQSEPIKAHQELAKENIIVQRGNGFSVWNVKENTGFSKDAALHNLPTVAAPSGTTDRFITAARLLGAGLKNDLALGTPTSSESTEQSIQRGEREMKELTRWLATGYLVDDNHHSMIEVNLGAANHGLAPQWGLNLYTEPFSSPIHAKGFSISSQEILAQLEGRDDVHTDYSTFRKDLYGGSRATVNADGSIKTSSRZ

SEQ ID NO: 3852 - protein, 347 aa, Photorhabdus luminescens; identical to SEQ ID NO: 2109

SEQ ID NO: 3853 - protein, 647 aa, Photorhabdus luminescens
CIDLIISVELIFQNKKRKIIIMSELCPSGTIDSQKMTENWVEFQLVDEQGNPLVNMPYRLISSGRLRDERKGVTNNQGLLREENLSSDAVTLYISAQPLADEMEQRPLREKRSIRASVVKPKAETEGHQHRYVTIGQISDGLPVIDKWIEEKPPRYHFPDPVPKGFRVLSTNCRYILEVCPFRAWVLLLHHQKDYSLVNAYNLALMGLLSYFDDNVDIAGSITHFFNRQMLDISQLPSKVEKISRTPIVYDVPFSERYTDVVFIDSKAGESGIGDTELFYVANQQEIIVSWRGTASVNDALTDIMYQPLKLGCEPDGVCSGFINNGKVHRGFWEAFNLIGQLKAPGSDENVFDKVIDLARSRNLFICGHSLGGALGLLHSAQLKKYHPCLYSYGMPRTLTRSAVQELEEITHYRHVNENDLVPSMPPEKDLDNWLYNYWGPLGYLFSTIELLGLTNGQEVFLHHGEIVHFYKADLIIETLKKSDSNDLIRLTEILPVMAKLYLIPSLNNETKDNMKVALEIQKEFFKQISDADKNKWFPRNANPTLKYALGVPDHRMLKYIHYIGDRIAELFAPDKYYFYQDQKQLFENTMNERSDIIPDIRQRNTLFLNMDNQLEQALIDTLQDKQSILALTRYTNIATRIEKELZ

SEQ ID NO: 3854 - protein, 189 aa, Photorhabdus luminescens
MEQENVVNIEWIDIVNENNEVIAQATRRQMRAQRLRHRATYIVVHNGMGKILVQHRTVTKDFYPGNLDATAGGVVLTGENMLDSARREAEEELGIAGVPFAEHGSFYYEAEDCRICGALFSCISHGPFALQEAEIDDVCWLTPEEITARCDEFTPDSLKALSLWLTRNNDFDEIIVYKKNENSPKRVIZ

SEQ ID NO: 3855 - protein, 260 aa, Photorhabdus luminescens
RFNMVFSSRQSWHYLEPKIQELHEISSKLNFRYLSDVRSGSRFLFEINELIRTVNHEIGTNCLSADGGIAILQDEIDNLKRQEFDLLMNDSQIYMIVQKEEEDEKTNLTLKRIGFVSGGSQIFAGLGVCVASLGAACAGFGVPLLIQGGNNVYENGYYLLLRKEVSGPVRDVYRDAAKTLGYSETDGDRVYGYVDLALSGYGMARSVVRPGTFRLFRYIKTDYIRGWQVMGRIPLIAELIGDMVTGLSIYSISEGEKHEZ

SEQ ID NO: 3856 - DNA, 743 bp, Photorhabdus luminescens
  misc_feature (476)..(476): n is a, c, g, or t
atgatatcgtcacctgtatggaaatgctggaacatgtcccagatccacaatcggtcgttcacgcttgtgctcagttggtgaaacccggcggacacgtctttttctctaccattaaccgcaacaaaaaagcctggcttatggcggtaatcggcgcggaatacatcctaaaaatggtaccgaagggaacccatgatgcgaagaaatttatccggccatcagagttgataggctggattgacagaacatccttgcgggaaaagcatattatcggcctacattataacccgctaacggataaatttagccttggtcacaatgtagacgtcaattatatgttacacagtcagtatgtctgacatattcatctgacagactaataaagcggcaaataaatcacattttcaggaatttttttactcatttttgccggtgtttttgtcagagcaaccgctagtaatgatgcaggcttccggctntttaataaattttagtcctcaagttatccacaagaatccgtatttttgtacacttgataaaagctgcttttaacattatcttgttgtcattatttagtgtaccccctacatattgtgttccttaacattccattaccactactctctcgttggttcttcccccactgagggggttatgttttggtctaagtcaaagacacaaagcaggtgggagtgaatctgaaagtaatgtaagtatgcctgtccatgaacatagcctgctagtac

SEQ ID NO: 3857 - DNA, 651 bp, Photorhabdus luminescens
  misc_feature (48)..(48): n is a, c, g, or t
  misc_feature (84)..(84): n is a, c, g, or t
  misc_feature (91)..(92): n is a, c, g, or t
  misc_feature (114)..(114): n is a, c, g, or t
  misc_feature (556)..(556): n is a, c, g, or t
ctctctttggggttagatattccttatttttgctggcatccagcgctnggaagcgttggcgcttgccgccagtgtgcggtgaancaatatnnaaatgcggatgatacgcgcggncgtctgatcatgtcctgtatgactccggcaacggatggcacttttatctctattgatgatgaagaggctaaacagttccgtgagagtgtggttgagtggttgatgactaaccatccgcacgattgcccggtatgtgaagaagggggcaactgtcacttacaggatatgaccgtgatgactggtcatacattccgtaaataccgtttcactaagcgtactcataacaatcaggaattggggccgtttatttctcatgaaatgaaccgctgtattgcctgttatcgttgtgtacgttactacaaagattatgccgacggcgctgattttggtgtttatggcgctcacgataacatttattttggtcgccctgaaagcggtacgttggaaagcgagttctccggcaacctggtaaaaatctgtccaaccggggtatttactgatnaaacccattctgaacgttataaccgtaaatgggatatgccagttgccccagaatctgtcacagtgtagcattggcttgtataccagccgggggag

SEQ ID NO: 3858 - DNA, 761 bp, Photorhabdus luminescens
  misc_feature (657)..(657): n is a, c, g, or t
  misc_feature (734)..(734): n is a, c, g, or t
ccttattttcagtgggttaacacaatgataagtaatgtaaaaaattcgatacgcggaacatatcattcgattagcaaaaagtatttacctcgttatcttgccgaattctgtttcaagttcaattggcgctttaaccttaaaaaaacattcgaacagcttatttattcatgtatccgggcagcacctatacctgagtatttactcaagctagctgagattcgatggtaatcaggtaaaagaatgctcaccagatggaaatccaaaataactaaacagccttctgcatccatatgggctctaaaaatggttctcaccttcctaccccttgtatgcaaccgccttcaaactctacctctcaatgagccgtagccgtaacagaagcgattacacatgaagtgtgcctaaatgatttggcagtatcagacccctgaccagaaaacatgcctagatgaacgtaatgttccggtgaactcaccttgcgtggtcagataaccacaaaatgggatgttaacggaagggattctcaggccagggcaacagctcattcaaccgattgttcggccagacaggcagcccgctgaggacatcacgtaaccagacccagggctcatgtccgttggctttggccgtttccagcaggctcattatcatggccgnccgttgccccgcggccagtgaacccgcaaaaagccagtctttcggccgagcgccacaccccggaccgcattctccgnccggttgttgtctatcggcaccccccg

SEQ ID NO: 3859 - DNA, 666 bp, Photorhabdus luminescens
  misc_feature (496)..(496): n is a, c, g, or t
  misc_feature (526)..(526): n is a, c, g, or t
tctgaccaactgcgacatagacacattttatgcctgagtcacgttggttaatgattgcgtcaatagccagtgctgttttacccgtctgacggtcaccgataaccagttcacgttgaccacgaccgatagggatcatagcgtcaacggatttataaccagtttgtaccggctgatcaacagattgacgatcaataacaccaggagcgatcatttcaacagcagagaaaccatcatgctcaacagggcctttaccatcaattggctcacccagcgtgtttactacacgaccaagcagaccacgaccaacaggtacttcaagaatacggcctgtacttttgaccttcataccttctgctaagtcagcatacggacccattacaaccgcacctacggagtcacgctccaagttcaatgcgattgcataccgattgccaggcagtgcgatcatctcaccctgcataactttcgctaaaccgtgaataacaatgatacccgncgttaccgatacaatccgtaccttcattgngagcttcaactcactacattgaactgaccaatgcgcttgttgatcagttcccttgatttcgggggatttaattgcttatgctccagccccttaaaactggcagaccttttgtaagcaatcaaacggccacaattcttgct

SEQ ID NO: 3860 - DNA, 757 bp, Photorhabdus luminescens
  misc_feature (757)..(757): n is a, c, g, or t
aagcttgggaacctgctttaattgaatgtagagggatcagggttgctgttttcggcgtaacgggcatttattatgtcggaactgaagccggtagttttcagggaggcgttgcagcgttacgttcaagagattattacagtcctcctttttccggagctgtggttcccggagcgttacccgatattatgactgtcatcaatgaagatgattgggcacatttttcatgcttagttggcaatatccgtagccaagctgattttattattgcagcgatgcactggggcgatcatactcgtaaagacattattacaagatacgaaaaggaaatatcaaaacgattatcacaatgtggtgtgaacctagtgataggtcatcatcatcattccttgcgaggtgttgaatggcacaaaaacatgctgacatgttttggactgggaaacctcattttcgatcaatctctctcatgctcaataaatgaatggtcgaaaaccggttttcagttgcctgattatgcacgatataccgcagccattctgacaagatgttcaccgaacgaaattttatctgctcatttgctcccactttatattgaagcggatacccctgtccctgtttcccatggaagcgatgaatggcatgcttttttacgcattatgaggcgttgtgctcggcaggacatgacggtcaatcatcttgttgataacggcactcgatggggcgatttcactgtattggatatattaaacccatttctgan

SEQ ID NO: 3861 - DNA, 660 bp, Photorhabdus luminescens
cttctctcgtcctaccatcagatcaagatacccctgacacttctgcataattgactggcctctttccgtgattaaatccttataattaggaagatcggccaaagaatttaatgcttccagcgcctgtataagcatcttatccgatggcggatgaacgtggcatttttctggttctccgagatagtttcgtctcaccaaaagaacttctacagctacgacgatactatgaaagactttatcgatagggcgcttaatgttgagtattgctgattttgcaaaattggcttcattctggagaagcttgtagtcatggaagtgcaaatatcggagttcgtctataaaaactaaattatgagtaagttcatggaccaataattccgtgagatcttgtacgtgccagtgtttacggctgttgatccaaatcacacccacagcattcgaggtggaaccgccccctgaattctttggagtctctcagaaataaactatctatcgccatctgaaatacagcgtatatctgtggcatccttagcttcattcttctaatgcagctaacaaaactccagtcggtgcttacgaccatcgtcttttagactatccgccatcagagaccattgatctctttcatttaacaaagcgtctgttccataaagctctacc

SEQ ID NO: 3862 - DNA, 762 bp, Photorhabdus luminescens
aagctttcgagtctgaacataatcccgttcaattattctcatctcactaatggtgaccgtccaaacggtcaccaaactcgataagaaatagatgcctcttagccacaaaaacatcgcctagatcacactttagtcacaaatcaccatttcccaacgaaaagtaccagcgaaccttccaaaaatctattcaagaaaagccgttctgaggattcaattaagaaacacaaaacaaacactaaattaacatttccgtgccaatattgattatattatatcaagacaggcgctttttatgacgactgtgaggtagatatgaaaccagaagattttcgcgccgacaaaaaacgtcctttcaccggtgaagagtacttgaaaagccttcaggatggccgcgaaatttacatttatggcgaacgcgtaaaagatgtcactacacatcccgcattccgcaattctgctgcttcaattggtcagttgtaccatgccctgcacgccccggaaacccatgataccctgtgctggaataccgataccggcagtggcgggtatacctcacaaatttttccgctttgctaccagtgcggatgatctgcgccaacaacgtgatgccattgctgagtggtcacgtcaaaactatggctggatgggccgtacacctgactataaagcggccttcggtacgcactcggcgcattccctgatattatggccagttcgctgataacgcccgtgtctgggacaaacgtattcaggaaacaggcg

SEQ ID NO: 3863 - DNA, 657 bp, Photorhabdus luminescens
  misc_feature (13)..(13): n is a, c, g, or t
  misc_feature (21)..(21): n is a, c, g, or t
  misc_feature (224)..(224): n is a, c, g, or t
  misc_feature (295)..(295): n is a, c, g, or t
  misc_feature (308)..(308): n is a, c, g, or t
aggagataatatngagcgggntgttggctgccatattttgaattcatttcattatgtatgcgctcagtatttctttgattaatagactgatttatttcttgatcaggtaagttataatagatttttagatattctaacgttgccattaaagagggctgaatatcgtcaaagttttttttatagagtcttttaatttcctcttcgtcatctgtaattttatccgntaggatattaaatagttctggagagatggaaatattaatccccaatagggaagtttggtatttcagtttancgatggttgtttntggggaagtattgaattgctcaaataccggagcctgtaactgaataaccttacgtacattttcgtaagcatcgtgatatggcagacagcccgaagagtgaaaggttgatagcgctttcatcacatgagtatggccttgctgcccggcctgcgtctgaatccctttcagcaacactttattggacagagaaagtgtatacatttcctcatccatattttgctgactgagtatcactgatttcagatccgggcggcgtttatccagatgataaatggagctttctgcgtgtaattccgtgcctgacggtaagttcagtcagcatagcccgggagagaactggatgcactgg

SEQ ID NO: 3864 - DNA, 773 bp, Photorhabdus luminescens
  misc_feature (489)..(489): n is a, c, g, or t
  misc_feature (721)..(721): n is a, c, g, or t
aagctttgccaggattttaagttttgctctgattatcgccggtattatcggtctgaaattgtccagttaatattgaactgcactccaaaggtttcacattttggcagtgcagcttctatacctgtcatctttcaagttgcctctttgttggctgcactcactcaccccggtcacatcgttatctatgctcccggggattcgctcccttgccgtcgcgatgcaccttgaaatccatagggtaatataacccgaattctgcttaatccgtcattgaaaaatcgtcttctgagtagaaaactttcagtgatggcttcttcaatttaaggcagtaagcaatcaatccacctaaaacgcacaacagaaagccttttatacttcggtggcgggaatgctctatttgagaaagagtttttaattgcccattaatcgtttcaatgataaaacgcttttttaacattatcttatcccactcagcttgcatactcgctntcatgttacgccgttttttcgtgatgaaagtgacatcggttttagctaaatcgccctgccatccctggctgaggtaacctttgtaaccgtaaagagaacccgttaattcttttgataatccacgaacaggttccccatcatgcacattacccggagtcactctaaagcgccagaatttcaccctgatgattgacaaccaggtgtaatttgaaacccggaaaccacgccatcngatttttttccgcgctttgctatcccccgcaagaacttacgcctagggatgc

SEQ ID NO: 3865 - DNA, 657 bp, Photorhabdus luminescens
tatcatgcagatgaatttcagtttcttcttcccgctgccattaattttactggttcttggctccattattctgctggttatttggaataaactggaagaaaggcgctggctggtcgttgcctcagttgtcatgctcctgataatggtgtggatggcaggtgaacaatacttctcccttaatacagcgtatggtttctccctattagctggcactgtcttgttgttactgtcacatagtgtctggttgattaaccattaccgtttccagttcaaatcttctaaggcgattggtgccacctgttattttatcggccattttctgattattccttctatttatctttaataaaaagactaagttgaaaatggatatcagcactcaatcgtacaatttaacaactttattttttccttttatcgactctggagtaagctcccaagtgtagagctctatcattatcttttgagttacctctattcagggggagctcatgtcctcaattccaacaaaattattctcatcaacataaccaccccatggaacctgctgcccaacacaacttgttctatcaggctaacaaagtactgaactttactcatctgaacttaaccatggaaggttggctacataactaaccttcccagaacacatagacc

SEQ ID NO: 3866 - DNA, 764 bp, Photorhabdus luminescens
aagcttcccccgccggggtatcggtatatttatcaaagttgtcgacaaaacgatgagccaaatctttcgccttctcttcccattgagatttatctgcataagtcttacgtggatcaagaatgtcggtatcaacacccggcaacgctgtcggaaccgccagatcgaaaataggtaatgtaatggtatcagtttcttcaatatcaccatttaggatggcatcaatgatcccacgggtatccttaatcgagattcgtttacccgtcccattccagccagtattcaccagataagccttagcacctgcggcctgcatacgttttaccaacacttccgcgtattgggttggatgcaaagtcaggaatgcggcaccaaaacaagcagaaaatgtaggtgttggttcagtcacaccgcgttcggtacctgccaattttgccgtaaaaccagatagaaagtgatattgagtctgttcgggtgtccaacgagataccggaggtaacacaccacatgcgtccgcagtcacgaagatgaccttagctgcatggccccgtttagaaacccggttaacattgttttcaatatggccgataggataagaaacacgggtgttttcagcctttgaaccatcacggaaatcaaccgtgccatccgtcagtccgtaacttttccagcaccgcatccgttcaatccccttgaaatatcccgtccccctctttgacagatgatggttatcgcaacaccccctcgaagcccgatcccgtctcatc

SEQ ID NO: 3867 - DNA, 671 bp, Photorhabdus luminescens
tctgaccaactgcgacatagacacattttatgcctgagtcacgttggttaatgattgcgtcaatagccagtgctgttttacccgtctgacggtcaccgataaccagttcacgttgaccacgaccgatagggatcatagcgtcaacggatttataaccagtttgtaccggctgatcaacagattgacgatcaataacaccaggagcgatcatttcaacagcagagaaaccatcatgctcaacagggcctttaccatcaattggctcacccagcgtgtttactacacgaccaagcagaccacgaccaacaggtacttcaagaatacggcctgtacatttgaccttcataccttctgctaagtcagcatacggacccattacaaccggacctacggagtcacgctccaagttcaatgcgattgcataacgattgccaggcagtgcgatcatctcaccctgcttaacttcggctaaaccgtgaatacgattgataccgtcgttaacggatacatccgtaccttctttggaggctcactcactacattgacctgagctatgcgctgcttgatcagttccctgatttccgtgggaatcactgcttatgctcccatccctctagactggaagacctcggtaagcgatctaacggcccgaatactgccttcgataccat

SEQ ID NO: 3868 - DNA, 763 bp, Photorhabdus luminescens
  misc_feature (545)..(545): n is a, c, g, or t
aagcttttcggacggagcagccactatgctcatcaacaaggtggtaaaacgtaccaccagccgctttatcgtctcctctgcaaacaaatccgtgttgtactcgaaattaaaagtcaggccgtcctctgtttggctggcatccagtgtcaattcatacatcgcattgcgggtctgttctggcctcggccacaaacttaccccttctaattgcagctccacactgtcattcgtattcatagaaaacatgatttggaacaacggtgaataacgggtgctacgttccggttgcaaccgctccactaataactcaaacgggacattttgatgccgctgggcagcaaggtttacctcccggaccgatctcagataatcgataaacgattgctccagctcacactcgctgcgcaataccagcgtattgataaaacagcctatcaacggcgttaatgatgtctgccaacggttagctatcggggcccccaccacatatctccgtgcccgctgtgaccactgaccagtatcgcaaatgccgtatgcatcccatnaacagagtgccccctcgtgtcaccgccagtgcctgcaccctttgctaccccattgtccccactaaattcataactgcgcgcatgactgggttggccttggtggcctcccgtattcataggcaccccttgtcccgggcgtaaatccgaaactgctgctgccatcagctccccctgctgctaactgcgattcctccgctgcgctctgtcgccaactgctc

SEQ ID NO: 3869 - DNA, 806 bp, Photorhabdus luminescens
  misc_feature (1)..(15): n is a, c, g, or t
  misc_feature (25)..(25): n is a, c, g, or t
nnnnnnnnnnnnnnnataacttggnggtaataaaagactattcctcaaatagaatattcgaaacatcgtaatccgataaattttctcttggaagcggcaaccggattggttgcctataccgtttaatctaaaaaaacaaatctggatttatgcacctatgaattagtcgttcttggaacagaaagtattgccgttattggtaaacgatcgatcgctgaaataaatctgtttaagttgttggcaaagctaaaacagattaattaagccatcatacgaaaatagattcagtagatatctgatattcttttggcgcttttaattaagatttctttgtaatcaggcgtctgtttttccacattggaaaatatagcttgaagagtggcatgagttatttctttgtcggcgaattctggcatgccgctattgaacgggggttctgggctatattgcatcgctagttggactgcttgggcatattctttaacctttgatttcagcatgcaatgttaaaccgaaatcaatacctgcggtgactccacctcctgtgaccccggtttctatcgataacgactcttttattaaccgggattgcatcgaatttgttgagatcgtttatcatcgaccaatgagtcgccgcttgatacccttttaaccaagcttgcggcccctaacaagatagatcctgtccaccgcctggggacccaagaagctttacttcccactttatgtatccaatcaagcatgtctaattccggcaagcaaagccttaagattctctggaccgggaccacaccaatatgcatttt

SEQ ID NO: 3870 - DNA, 772 bp, Photorhabdus luminescens
aagcttccgctgatcttatctccggtgatgcacctgactatcagtatctggccgcccgcttggcaattttcaacctgcgtaaaaaagcttacggtcaattcgagccaccctcgctctatgaccatgtatcccgtatggtgaaaatgggcaaatatgacaagcacttgcttgcagactactcgaaagaagaattcgagcaaatgaacgagtttattgaccattggcgtgatatgaacttttcttacgcggcggtcaaacagcttgaaggtaaatacctggttcagaatcgcgttaccggtgaaatttatgaaagtgcccaattcctctatattctggtcgcagcttgcctgttctccggttatccgaaagagacacgtctggactatattcgccgttcttacgatgcggcttccacatttaagatctctctgccgaccccgatcatggcaggtgtacgccacccgacgcgtcaatctagctcatgcgtattgaccgaatgtgatgatagcccgaattccattaatgcgacttccagcgcgaatgccaaatatcgccctcaacgtgcgggtattggcatcaacgcacgccgtattcgtgcgccgggaagccccatccgcaatggtgacccctccataccggctgtccctcttttcactaccattgccagaccggcgccaattcctgctttcatgggggcgttcatggcgggagccctccctgccctatgcattatggctctcgaacctccaagcccgctgtcgccaaaaacaac

SEQ ID NO: 3871 - DNA, 678 bp, Photorhabdus luminescens
atgcttcagcgtttattggcccggcggatcaagaggttatcactcaacaacagaaagcgttattgcagcaggctcaacagcagcgggaggcgttacgtaacaacatcactttgtctccagctttagagcacgaaactgatggtgctaaatctgtttgtcataccatccgctatattcaatttgaaggtgttgagagcctttcccaatcagtaagggaaaagttaatacagtcttatttatcccgttgcttaaccttgccagatattaatgaactggtgcgtaaagtatcgaatgcctatatcgagcgaggttatgtcacttctcgggctggactcagagcacaggattcatccaccggtacgctcattattaccgtgagtgagggcaaagttgaatcaatcactcttgatggtgagacatccctttaattgaaaatggcctttccgggaatggttggtaagactttgaatctacgggatatttgaacaggggatggaacaactgaaccggctttccttcccaacagaaaaccattgattttcagccgggaaaacagccccggtatcctgcggttatcttaaaccaatatccactccgtttgccggttggtgccagttggggatagatattagcggcaataacgtcctggccccggcaaatcaccgccgtgttgatgag

SEQ ID NO: 3872 - DNA, 769 bp, Photorhabdus luminescens
  misc_feature (473)..(473): n is a, c, g, or t
aagcttgcgaatctctgcgggtgcattgtcaccgacatacaacgctttgcgacccagcgcctgttcgatacgtgcagctaactccaccggtgttattggctgttcaaattccccatgcggcacgaatggctcaaccaacccgaccactttcgcattaatcagacgggccaattgcacgttatttcccaatgatggatgggcatcaaggggcagatgataaccatataaattgatatcattacagagcagcgttttcaggcgattacgtttcataccacgaatcactgccggctcatttttccagaaatagccatgatggacgataacagcatcagcctgaaggcgaaccgcttcatccaataaagcctgacaagcggtcacaccagtaacaattcgctgaatatgagcacgcccctcaacttgtaaaccattgggggcataatcctgaaaatcaccaacattcagctcttggntaatgacattttccagctcaatattacgcatcatatttgtcctgtgtattgatcgcatgacaataatataccgttacctgccgtcaattgtcagttgtcagctacttttgattgccaaacctgctctgactgttcaaccatacgggcttatcgctggtttttacccatacacgatacacatacctgctaaaacgggcgccatcaccaccaaacacttaaccggacaccgccggataccgaaagtcccagcgcctatacggcgcaaagacctcgataccacgatcctcaccatatga

SEQ ID NO: 3873 - DNA, 670 bp, Photorhabdus luminescens
aaggtaataatccggcaggctcgataaaggacagaacagcgctatcaatgattcagcaagctgaattgcgcggtgaaatttctcccggtgacgtattaattgaagccactagcggaaatacgggtattgcgttagcaatgattgccgcagtgaaaggttatcaccttaaattactgatgcctgataatatgagccttgagcgtcaggcttctatgcgagcttatggtgcagaactgattttagtgagtagagcaatgggcatggaaggtgcacgtgatttagctcagcaaatggagcgtaatggtgaaggtaaagttcttgatcaattcaataacccagataatcctttagcgcattttacgacgacagggccggaaatttggcagcagacgcaagggcgtattacacattttgttttcagtatgggaacgaccggaaccattacccggtgttagccgctatttaaaaagccagtctaatcgtgtacagattattggcttacaacccgcggagaatagccatatttccggtattcgccgttggtcgccggcttattcgcctggcattttccgcaagagctacttgatcaagtgctggatatacctcacaaagaagctgaaaatcccatgctgttattacctaagaagaaaggatcttccgggagctagca

SEQ ID NO: 3874 - DNA, 780 bp, Photorhabdus luminescens
aagctttcgccgccttgcggccatttctcccggtcaaaattaaacaccacccgatataagccgtctttgtcgatatcgccgtaggtatcattcactttggtactgctcacccgcgcgggtatcgtgccggccatcaccggtttcggcacccgctccgggcgaaagcacacggtctcggaatagggaatggcagtgaatgtcatctcaaaactgctgtcccggcgggcactgttggtgatctgggtgatgatcgcccctttgcgaaacgtttccggggcgtcacctttcactttcaactcctgtcccggcaccagcgtggcggaggtggtcattccccgcaggcggatgcgttgattcaggtaacgttcgtgatgcaaacgggcataaaacaccccgctttccgtctccggttgataggcgtaacgatcaccgggtattcggtagtcgtcacggtaatggtacgcttcgacataagtcgttcgatcgccccgtgtcacatcccggctcggtgttcaagccgggatacggaccgggcattgtggcagtcatcattcccgagtcgcattgttccctgcaccacctgatacgcgggctgcatgcctcataccaccgagtgctcctcgccgcgcatacctgacggattgccggcaggccaggtcacctttgaactggcacgcatgctcgtcctccgtagaactggcccccctccgatatttgaaccggagctcaccgccggcactttcgccccgatacccatttccgccagtctccgttggatat

SEQ ID NO: 3875 - DNA, 656 bp, Photorhabdus luminescens
ctttctcggatgtgggtggtttgaaaggaaacatctctatcgcccgtggtgtcacgattgaaaatgcgattggcggcagtggtaatgacattctgatcgggaatgatgccaataatactctgaagggtggtacaggtgatgacatcatttacggtggattgggagctgatcatctttggggtggggaaggcaaagatacctttgtctacttgaatgccgaagaatcatcgtttcttgagcgtgattggattcatgactttgtttccggtgaagacaagattgatttgtcattgttcgatctgggtgcagcaggaaaaggcactattaactttgtcgaggaatccactggtgctattggggaaactgtgatcagctatgacagcgttaacaaggtaaatgatttccttattaatatgggaggacaattatctcacgatggttttggggtgaagatcgttggagaaccgctgatacaggccgatttcatcctttcataacacaaccacccaaccgcttttgaccgatgccgttattcggttacccatttgagcgctgggcctgccattctgctccctgcctatcccgcctctgtttctgtcctgcggctgcattcctaccattactgtccctaattaataggcaatccttggatccct

SEQ ID NO: 3876 - DNA, 760 bp, Photorhabdus luminescens
  misc_feature (755)..(755): n is a, c, g, or t
atcgctatattgaaaatattcgccgttatcagcttagtttagtcggatatttacaggccaaagaaaatcggaaaaaattaattccccaagaaaaccaaccaaaataaagtaaacaaatataaggctctaaggagtcaattacagccattatatatcctcagttatattatgtttgacaactaattcagctaaccatactaaattcatcgggacactatctctctcaaaggataaatcatgattaatttagacattaacgaacaaaacaaaattatggtcgtcagcagccatgtatttagaccgacgacggcgaatggtcgagcctttaccgagttaatagaagcattaaaaaagaacaatttcgctgttatcctggcggctacattccaagatggcatagctaccgtttcttctgattcctcactatgctgtatttttgttgattggacttcaggagataataactatgaatctcataaacaagtgttagaattactgaaagagatacgcaaacacaatacaacccattccggtattgttgaccgcggaatattccagcatcgacacactgacacttgaagtcatgggattggcaaatgaatctgtctggatgcttgaagacacggctggatttatcgcctctcgcgccagttcgctaatcaagacatattatcgcgcacatattaccgcctttcactcgtgcattactgcaatacacttaagaatcaccagaatattgctcggactgctcctgnacata

SEQ ID NO: 3877 - DNA, 798 bp, Photorhabdus luminescens
  misc_feature (1)..(1): n is a, c, g, or t
ntcgtagagttactacttctatgcctcggctggtatgacgtgcggcaattgtgagcggataacaatttcacacatgaaacagctatgaccatgattacgccaagctatttaggtgacactatagaatactcaagcttacgttttgagatgggtgagctggttgctcacattcaggcccagagagctgagtcagccgggattttggggatcgctgtggcacctgagcaggttacgcagtttggacagcaggtatcgttcgatgggattggccgtgtggtgggcctgaaaggcgatattgcacaaagcgaaattaatcgtctcactgatttgcaaattaagccattaacccagactaactctgtagcagagcgggaagcacctaagaccgaaaacgaaagccttatcgttttcgtcagccgattacaacaagaagctatcccagaaggtaagccgctgattgaacgtgccagaaaactttggcttaccgggcaagtgacaaatgaaaaaaccaaagaattatttaaggatgctgttgcccagttgcaaacatatcctgaattgcacacgctggctcaacagctattgactgatgctaataaagagaaggccactggacaatatattgataacctgtttggcccgccttttgattctgaactggcttatgaactggtgaaaacggcttcaccagaggcgaaaaataccgctgaacgaaccaggtactttttggtagaagattctgagcggtggataagtgatctttatcctgaaggtgagaacctcaccgggccattgata

SEQ ID NO: 3878 - DNA, 742 bp, Photorhabdus luminescens
aagcttctctctattttcaagtacagcatacttagcttctaaacttgccgatgtagatagagaatcgatgttattttcataaagttgtctttttgactcttctatctctgccactaattcgtctcgttgagataagactttgattagtttgattctgtaccctgtttcttccttatgcaagtattgacacttacgaagaaaacgctctaataattcttcataatattcaacatcaacatcaaaaagtactcttccgaatgattcttcgaaacgcttcttagctgcttccagagcttttaatgttgctctgatttctttaaggtcgatatcaattaaattgattttcccttgaagtttgtaatactccttgggttttacaccagcatggaagtttaaaatatttttctgccaatctttgtacattttcaaactactgaatgaatctaatactgtaccccctccgttatcttggtcgatatagaatggaagataaagacttgcaggttgtgcttgcccttgaactaaagtttcctttaagactaattctaaattaaagtccaagatatctcgtacagtccatgcaatatccgtacgagaatcagaggtcactaagaggtgctcttgttctctctgcatactcaagatggaacaccttcttcgcgacaataaatgcctagccacgattattaacccaaataacaactttcgaaaccagctctgatgctcgcactcttatgccgca

SEQ ID NO: 3879 - DNA, 642 bp, Photorhabdus luminescens
  misc_feature (12)..(12): n is a, c, g, or t
  misc_feature (50)..(50): n is a, c, g, or t
  misc_feature (92)..(92): n is a, c, g, or t
  misc_feature (112)..(112): n is a, c, g, or t
atcaaaatattnataagcatcgccaagggcttttcttgcttgagctttangtacgccagcatcaatcatctccctataacttgtatgaaatncctctttcctcatatatctntctttttatcttttgtgctgcgctgatttgagcatgaggcatcctagaagttgaatgtaataatgtagcgggcgctgataagtggttttgctggttaaggggagagcatgagatgacaatagccattgaacatttgcaggacattcagttaactcaccttgaagcgctggctttggcccaactggtcaagcggctgaactgggcggagatacgcgcctgtgccgtgaatgacgaggaggcgtatcagattaaggatgccctcggtaagcttcaatctgctctggcttaccgagggtatgcgccacggtaaatcaataagaacatcggaagatctagtgattgtgaactgcttctctaaatctagtcattaaatgttgaatctaggcttttgaagggcagtaaatctataattccattaactattcttcaaaagaataggattgaaaatactaatgccttttatcttttttatacccgacggataactcctttttaatatcaaaatatctcttctatttagagtcttgata

SEQ ID NO: 3880 - DNA, 747 bp, Photorhabdus luminescens
  misc_feature (455)..(455): n is a, c, g, or t
ttacgccgtcgtgcgctcattccacgcatcagcatgaatgatgttgccgtctttgtaggtccaggtgattttttcgtaacgcaactcaatgcgttccagatggttgtgcttctctttggtagggtctttgatgtcatgcatcagcggtgccactttcaccaccttcacgttgtccagttgggtgatgaagtactctttctcctgacctgcgtcgtcaatgttgtaccatttgatttcagcagatttcagggtctggccggtggtgaccgctttatacaaatagggacttgatgcatccacctctttggtgaataccaatggggcatgcacacgggtccccgtcagtttgccggtattgttgtccgtcgggatgtgcaacatatgttccaacgccacaatttcaatactaccttcccggccccgtacctcgacagagcccttgatgtcagcaccgncgtcatctttcagccataaataagcgggaatcgccataatgattactcctaattgttacttaagtgatgtcgccggtagcggcgacgttgttgataaggtgtccggtactttctgcggtcgcgcacaggcggccacatgcggtatcagacggatttcaaccctgcgattggcagctcgccccgcagcggttgtgttagtcgcaattggactcgttgcctccttgccttgtacagtgaagcaagccggcgatatgtcgctggtttgaacatccaatcgcgtactgcttcggcg

SEQ ID NO: 3881 - DNA, 657 bp, Photorhabdus luminescens
  misc_feature (626)..(626): n is a, c, g, or t
  misc_feature (657)..(657): n is a, c, g, or t
tagtcagtttatttagccaacgtaaacctgttcgccgtgcttttatcattcaggttcatgataaaaatgtggatgaaaaccccaatttattaattggactggaaataaatggcaccgcagacgaaattgagcaactgatccatgaagcgggcactattgcttgtgaatacacatcggaagaagagccgattgacttctgtttagttgatgaaaaagagagtggcatcagccattatttgattcagcatactcagccattttaccagcgtaaattaggcagttggttacgtgaaagcattccggttatgaataagtgattatttagcgggtgataatatatacccgtcatcttgaaagataacgggtatagcagctttatctgtatctggtagtcaagctcaataacttttaccaggtttttaacttgaaaagccgaccagattctccttcgtcatgcagttgaagaacaatttctgtactgtcaaacactggcagctctttaggagatctagtaggaagatctgaatctattagtgtgataacagactgaatacctaattcaacgtaatcgcgtaaaatagcccataaattctctttctttctattatccaaagactcgaatactncatcatgaaaggcaaaatgaggaaatttctn

SEQ ID NO: 3882 - DNA, 754 bp, Photorhabdus luminescens
aagctttatctccctctaccttaccaacaatcttcaaactattagtaatccaaatcaaatctgtctgtactaaatttactaaatttaatcctctagactctgttattacttctatatttccctttttatcctcaataaaaaggcaataatctccttctgctatagaaataatggaattaccaaatttatctctacttaataataaaatttccacatcactaagcacactagatcttccttctatttttccaagaatggatctgatggtagatatgttatatatattaccaattaaaaaagcagtatatctttcacttttaaatttagatacctttgttgtactacggaagagtatggttccagtagataattcatcaaattgaaattcatttattaatttatttaaatttttatcaaaaccatatttaacaaagcaaaactctgagctcaattttaaattcctttttataactttataaaagtattttaaatagttatacttctaaaaattaatctggtgtcaataatagtatcatattaaattaatttatcaatgcatttgatcattaaaattaaaattatctatatatctaattaactatttgcctttaaatatagaactcgcaatattattgtacccgtgaccatcacgcctggttacattccccctgaatataatgcatctttcatggacccagtaggacaagttcactaaatctagttggtgcattccataattccttcacaagaattt

SEQ ID NO: 3883 - DNA, 672 bp, Photorhabdus luminescens
  misc_feature (458)..(458): n is a, c, g, or t
  misc_feature (561)..(561): n is a, c, g, or t
aatttcacgcctggggaatattttagctataccaatatgggctataatttattggcagaaatcatcaaagtggtttcgggtaaatcgttaagagaatatgcgaaagagaatatttttattccattaaagatgaataatacctctttctatgatgatgttactgaggttatctctgaccgggcgataggttatgtctataacgcagattcaaatcaatggataagatcggatcataacgattcaactataggtagtgcggggcttcgttctacagtgagtgatttatgccgttggatgaaagcattttattcaccatcgattgttcgggatatgttgcctcatttatctcgtatgccaaatttagccaatggcaatcgtaacaattatgcttacggtttgatgatcagccaacgtgaaggtcaaaagataatacggcacgatggtgcctatgatggttntaaagctgaggtttgtcgtttacctgatgctaaattaagttgttgtgattactgctgcaacaggtattaatagtgttgagtttactaatcaatgtcttaatgnaatatttaacactgacatggctgaaccagaacattgccgaaccattgataatgatattacccggtttgttcaaggggggctgatccctattcctatattattacccaagag

SEQ ID NO: 3884 - DNA, 771 bp, Photorhabdus luminescens
  misc_feature (753)..(753): n is a, c, g, or t
  misc_feature (755)..(755): n is a, c, g, or t
ttgtgtaaccgccaatgtatcgctattaccaaccacatttgtaagctggacaacacctttttgtgttaatgaagcactgggaatatctgttgtcattttttgctctagcgctttatttaattgagcggtgagtttggctatgtttccatcatccagaacatcattgccagatcgtgtcgcgataaaatcagtcacggcagatgataccgctgacgcttgacgtaataccttatttaataagtgggtgggaacattatctggtgaaaatccagtttgtaaactctgatttacctcgtatttgtcttgactgattacattcgcattatcactagtagaaaaagccttaaaatcattcttataactcatatactttctcctgcaattaaataatattattttacaaccaatatattgaattattgtaaaaacaatctctcttgcaattcacgccaatcaagtctagttcagaaaaagaataatgcagcgttcttattaccttataggttaattatttttatataattggtagtaataaatagttcaacattagaaacgacagccggaaatttatctattaatacccattacgtatcactattgacattttaattaaattacccagatatacgtctcactgccaacccagtaatttccctgttttttctctttttctgcaagatggtctgactggatttactatgtttacgcttgacggtgactttttcttgagattcacctgtatttcgtcaacananattcacatagccaggt

SEQ ID NO: 3885 - DNA, 678 bp, Photorhabdus luminescens
  misc_feature (539)..(539): n is a, c, g, or t
  misc_feature (614)..(614): n is a, c, g, or t
ttcgagccggaagggcaaaaggttaaaactgaccggagggaagataataccggtatctatcgtcacttgttgacgggtgtttcttacatgttaccgatggtggtggcgggtggcctgtgcattgcattgtcatttgcttttggcatcactgcatttaaagaatcgggtacattggcggcggcgttaatgcaaatcggtggtagctcagcttttgcgctgatggtccctgtactggcaggttacattgctttctcgatcgctgatcgcccaggtctgacacccggtttaattggcggcatgctggcaactagcacgaacgcgggatttattggcggtattattgcgggtttcctcgccggttacgtagcgaagttgcttaacagcaaagtgaaattgccgcaaagtatggccgcattgaaaccgatcttgatcattccgctatttactagcctgatcactggcctgattatgatttacgttattggtaaacccgtcgccggtattatggcggggctaacgtattggctttctcacatggngacaaccaacgcactcctgctaggaagccattttggcgggatgatgtgtgctgatatggggggagcgataaacanagctgcctatgcgtttggtgtcggcttgcttagctcacaaacctacgcgccaatggcggccatt

SEQ ID NO: 3886 - DNA, 801 bp, Photorhabdus luminescens
  misc_feature (14)..(14): n is a, c, g, or t
  misc_feature (30)..(31): n is a, c, g, or t
  misc_feature (34)..(34): n is a, c, g, or t
  misc_feature (537)..(537): n is a, c, g, or t
  misc_feature (550)..(550): n is a, c, g, or t
actccttgtactgncctgggtcgtaagaannacnctggctgctgcaagcttgcccggcccgtttgttagcagcctcggctaagggacggcgcagcggttctgacacttcagcccagtgcggaatgcgaatgcggcgcaggtactgagcttggaagcgtaggaatccaccccgcattttcgttgaataggtcgccacaaacagacgagtgaccgcggatagcaggactgcctgcaaggcccgtaaatcccagtcgtctgacgtgacgtagtagaggttgtggtgaggatacagttcaccattttcatagacgatatgcgcctgtcccttgatatctggaatcaggagctttggcctcgcagccaacgacggcgtgatgcggtcaattgtgcgataccagttggccggagctttctgcgcacagtgacgcccagcgatcacctctcgtcgagcctcaaggtagcgccgcagacggcgatactcgtcaagatcgaccagtccgccctgctcagcacaggggttgataacacccagaccgngccactccacttngccggtcatgatgtctttggttgttaccagcggcaccttccggtctggctcaacattaagcgcgtcgacatccccgataaatgctttgtccccgccagtcgcaacaccgatcccgaccttacaccctggctcttccagcaggggaaagtccccctccgaccgcgaataaccgtcatctggtcgaatgacttcagcaaccaccgctacgaaccgttggccacttgggctagtccctgctcccggtcgactta

SEQ ID NO: 3887 - DNA, 658 bp, Photorhabdus luminescens
tttgagtcttctttgtttcgaacggggatatttttaactgttgaggataagctaaagcgatttctttactatcattcgaaaagaaatggaactgtgttggtattagagaaaagggaagatttagcatctgttttaggtgtttcagtcaggcaattaaatagagctattaagagtttgaatgaaaaaggaataattgtatcgaagaataagagagttgacattattgattatgatttcttaaaaaaggatattgagtttcaatttgacgctaagtgatgaaaataaaaaatcctatttttatcgctaaatagctgcattgttaacagaatataccctatggatttcgagatgcttcgcggcggcaaaggagcgaatccccgggcgcatagagaactatgtgacccgggtgagagagtgcagccaacaaagaggcaacttgaaagatgacgggtataatggttaaattacgatttgaaattaaagtaacccgattctgaaaaatctttgccagattctttaaacgttctttcggtagtggataacccaaagagagatacttttcagcgaaatataatgaactttgatgggttaatcccataggattaaagctgtcaaccatgtttctccgtagatcggatttaatatctttaacgtaatt

SEQ ID NO: 3888 - DNA, 769 bp, Photorhabdus luminescens
  misc_feature (378)..(378): n is a, c, g, or t
aagcttgaacctgagcccggatatcgaatttttttaaatgctattttagcggggtgggaatattcaccatgatattaatcggtgaccacgatggacgtaacccgctcggctagcgacctatgcggctattacatcataccgcccataccgcccatgccacccataccgcctgctgcacctaaatcagctttatcatctttaggcaggtcagtgatcatacattcagtggtgatcatcagaccagcgatagatgctgcaaattgcagtgcagaacgggtcactttggttggatccaaaatacccattgcgatcatatcgccatactgttcagtcgttgcgttataaccgtagttgccttcacctgctttcacgctgttngcgataacagatggctcttcacctgagttgtcaacgatctgaccgagaggagcttccatcgcgcgcattgcaacacggatacctacgtttcgatcctcggcttcgcctttcacaccaacaataggcgctgcaccgcgaaccagtgccacccccaccccaggtaccacgccttcttccactgctgcacaagtcgcatgccgacgctcgcgcacgcaagcacgcgtccgttccctttgaacttctgcggccactcccactctcgtacccgtattccccactcccacgtttccttccccccttttgctttctcctcggtcaagtccccacccgatctctcgtttccctacctgtcctgtcacccctccctcttctcgccttcccctatttccca

SEQ ID NO: 3889 - DNA, 659 bp, Photorhabdus luminescens
  misc_feature (170)..(170): n is a, c, g, or t
  misc_feature (360)..(360): n is a, c, g, or t
tgaccatgctcaatcccggcggctctaagaccttgaatacgacgactctgagagagaacgcggcaggcaagcaggttaagctggatatcaagatcaaacgtctggaacagcaactgactatgcaggtggctgcctccacgttgttcggcccaaaatacgtgatgctgttntccgaattacaggcctacaaggaggtcaatgctcgctacaacgccttactaaaagcatcctctacggaagaggccgcagctctcggcgggctgaccacggtgcctccggcctccgatgatctgccggtaaatatttcgttgctgatgatggaggagcgtcctggctacatccgcatgaacgtcgcactanttaatgccagcaccgatggccgcttcatagatttcttcctagagaacggcagattagttgtgtcggctgacaatgtattcaacttttccttcggtaccgaagcccgctccctagcctggcaacacaatacccgctcaagatgagcaccatcctttcgcttgccgacctatgcgccaattcgctcggtgccggtcataaccgattcggccagaagtactccccccactacctaatttcggaagcaccttgggtgaaggctttaggggcacgtgcttggtaacggtgcaaaatgctgctgg

SEQ ID NO: 3890 - DNA, 751 bp, Photorhabdus luminescens
  misc_feature (57)..(57): n is a, c, g, or t
aagcttatccgcgtcgatatatttccaattgcgtgtcgggaatgcaagcgcatcacnatcagttaactcaatatcctcagccaaataccaagcataatttttcatttgtggataatcagcgatttttaccataacaacctctcttttcatatttacaatataacagagtgaacgaccaactcaaccctattgcaaatatacacatattcaccgcaatagcagccacgaagtaatcatgcagatctgattcaagtttcatactataaatagtttacttactcataatcccctttcaccagatatggaaaaaatatataccatttcattattgacatccactcctaccgacttagccaggagtggatatcccatggatcatgctaattctctccgctgctgaacggcaacaatatgatccgctataccgagaacatcggcattatgctagacaacattccacagaccggccaccgctcaggtaaaacagccctaaaccaccggcccgatccgtatctaatgatgaaaccccactgtgaaccacttaaaccccctccctaccgtatagcatccggcccactgcccaacgggactctgacctcccaccatttacccttccagcctaatcaataccctgcctattccccatcgcattttatgatccccgtttacacctaccggctccagcccccaccctttagtactatcgatccgcttatgtccccctaccgcgtttcctcctcccctcataatc

SEQ ID NO: 3891 - DNA, 773 bp, Photorhabdus luminescens
  misc_feature (446)..(446): n is a, c, g, or t
aagcttggatgatatctcatgtaattcttggattttgggctctaaataatgccaactctgtcttgatgaaaataccatgttaaacctctataactcgttaattttgactcatgcgatccccaaacaatgtgataaccattccatgatcctgtccaaaagaacattgtaagcccttaaccttagaatgctgattgtaaattccaatggataaccgttatataaaaaggtcctcatccacggctgaatcagatagctatgatttggtcccacatgatcctaattcctgacaatacctattaaggcactccaatatcgagaaatacttttccatagcgaatacccagattatctgggccatacaatatctttacgacttctatcaaaccaaacccattaaatcacaacaatagaacaacaaacagtcttttttccccggatattctatntcctaaacactaaccattattcaaacctaatttttctctaaacgctatctattattcaaacctaaccattccctgctatatgctattattttcttccttacaccatcagagtttcatttgaaataaccatttccacatcggcttaatgccaaaatcagcaatactcaggcacgcaacgtctcttatgctcacgcatagcgttctcactcggacgatacaatgcacaatgataaaactgacgcctacgtcaaacgattcaatcaggtatgtaataatcatgagccggctttggatgacccgctacattgcacaaccgcttgtgtacca

SEQ ID NO: 3892 - DNA, 676 bp, Photorhabdus luminescens
tttaattagggcaagatcgctaatgtttttttaatcacgaatatatccgtcatctttcaagttgcctctttgttggctgcactcgctcatcccggtcacatcgttatctatgctcccggggattcactcccttgccgtcgcgatgcatcttgaaatctttagggtataaagaatagatcaattaatttggaggaatagcgctaaaaacttttctcagtggtcaaattgagtgaaatacagacaatgtaactcctgacaaggtaatgccgtcatgatgactcgttctgttttgaaaaaagacaggtcagcgatcgaccaccatcgtcgaaaaatagatgaactagatgcgtgcgcaatacgggttatgactgtagtactaggaaaacctttccttccttaaatcatattttttgaaaaattaatgtaaataatttgtgattataaacaccaaaataagaaaaatatgattccttgataattggagagaaataatattaacaaattgattcataagacaataaaaataataaactgatcaatttgtcattttggctaatggtctgatctattgaatatacatgtatatacaactatacaattagcagatatctaaagatcaaaaggagccagaccgtgaccgcccaaatagtaaattccgtagtgtcggtttccgggc

SEQ ID NO: 3893 - DNA, 768 bp, Photorhabdus luminescens
  misc_feature (295)..(295): n is a, c, g, or t
aagcttttgcccggcaagtttatgaagcaccgcagggggaaacagaaatcctattggctgctatctggagcgagttgttggggattgaacagatcagtcggcacgatagtttctttgccttgggcggccattctctgcttgcggtgcggatgattgagcgcctgcgtaacgtggggttaacgctggcggtacgtgacctatttcaatctccgatgttatcggcatttgcccaaacagtaggccaatcacctccggtggtggtgccggcgaatgtcatcaccccggcgaccacggnacttacacccgaaatgttgccgctgattgagctgacccagcttgaaattgaccatatcgtgggacaagtgccgggtgggatggctaatattcaggatatctatgccctgtctccgttgcaggacggcattctgtctcaccatttgctggccactgaatgcgacccgtatctattgcccacccaaatgacttttgatgatccccccttgtcggatcgtttactgcccccaccgcatcaggtagtcgctttgtcccatatatctgcgacccgtctttggtcggccaggatcttccacgccccctctacgctgccccggtttccagtcccttcctttctccttagcttgccctggtccccatttcttgggtccgcgcccgccctatttctccaaccttgctatgcccccacctctgctatttcttgcccgcaaccccatttctccctatctcattctcacgtgctcattgtcatca

SEQ ID NO: 3894 - DNA, 671 bp, Photorhabdus luminescens
cttcccccggtgccggtaacgcccgacggtccagcttgccgtttggtgtcaaggggaaggtatccaggcgtacaaacgctgccggtaccatataatccggcaaaatagcgcttagatgagtacgcagatggttaaccaactcttcattcgcttctgctgctacataagctaccaaccgtttgtcctggctgtcaccctgtgccaacacaacagcttcactcaccgccggatgttccatcagccggacttcgatttcccccggctcaatacggaaaccacggattttcacttgctggtcattacggcctaggaattccagattaccggctggcaggtaacgggccaaatccccggtgcggtacaagcggggcatccggcttatcactaaacggatctagcagaaaaccgtccgcggccagttaagggcgaatgaaatagccacaggcaaccccatctccaccgatataaatcttacccattaccccctgtggaccttgctgaccataggtatttaacaaataaaccccgttttttgctatctgtcaaccattggggatccgtctcatttccggtgataatgcttaatggcggaggtgatagtgaaagtcgtaccctacttcgtacataaccattcaatatccgtggaggcggctcttacccaaaactgggca

SEQ ID NO: 3895 - DNA, 760 bp, Photorhabdus luminescens
  misc_feature (377)..(377): n is a, c, g, or t
aagctttttgccccgtcacgatttggttaatatctgcttcggaaacctttgcataaaccgtcatatttttgaggtcggcaatttgcatgagaaccggtgtctgttgattgacatttagtgtttgcccggggtcaacatgaattgcggtcacgacgccagcaataggcgaatagatttggctataactgaggctgacttcttcactgtgcaaaatatgttcattttgcctgatgtctgctttgagactttcaattcttgcctgactttttttgacgccaaaagcagcctcatccagcagttgctggctggttgcggaacgcaggttaagctctctttggcgtttttccgtgatgaccagaagttgataagcgtattgntcttcttgcaacatggctcgcaatttttctagtcgcgctcggcttgcctcaactctagtacgataaaaagtatcatccatgctagcgaccagcttacctgctctaacaatatccccgacttcaacatataacttggttaactggcccgaaattcggctaccaacatcgacttgactggttggttgtacaatacccgaagcattgaccgtcctataacatcacctacgttccggtgagatttgtcctgacatcaccgaaatgtctccttttgcctaagcggtcttacccccgccctaaacctatctgatgatggtgtcacacccatttgttcttttcaccccacaccagtctcctttccgacttgtctcattcccgataccttc

SEQ ID NO: 3896 - DNA, 679 bp, Photorhabdus luminescens
  misc_feature (476)..(476): n is a, c, g, or t
  misc_feature (598)..(598): n is a, c, g, or t
caaacctgagttttctgataagttagccagtaaagtttctctttttcttattttggatatttttgcaaatgagagatattctatcttaggattttttattaaggcaaaacggatgagctcaatttactcagaagaataccagcgtgttatccgattattacgcgaaacacgcctagaaaaaggcattacacaggaaaaattggcacaagcatttggccgtcctcaatcatttatagccaaagttgagaatggtgaaagaagactagatgtcgtggaatttgtgcacatggccggtttgttgtcattaaatccagcccagattctagacaaaataaagctgaaaaaaccaagtcttaacagcaacctaaagtgaatatccatagtgcataccataaataaaaacaccaaaaaacgctttagttttattggtgtttttagtttaagcttcaatcgatgtctatagactctgggaactntccactcttataaattacgaataacaattcatataaatcagcacattgcaataactggaactcacaagaccatgaaaataccacgttctaatcaggggggttagtttgcgccctacatccgntgcatcttgcctcgcatcctgctccgaggccatctgccgtaacaaatgggccagtcggacgggtcacgtcgcgacggactt

SEQ ID NO: 3897 - DNA, 757 bp, Photorhabdus luminescens
  misc_feature (468)..(469): n is a, c, g, or t
  misc_feature (538)..(538): n is a, c, g, or t
aagcttggaggaatacattataaaacttcccataaaagaaggctatccccatcttggatgaaatgattgataaagatatcaatgatataagaaaaaataccataagtattatatgtttacaggaaaaagcctttattttaggtttcgttaaccctatatatccgcctatcaagaaactaatcaaaccctcagattggaaaggaagcaaaatattgaatgggattagggaaaaagagaatttgtaatctgttagtgcattcagcaatgtaagattagaaattataagcattatgatgagtattttcttaatcccctttgcatttgcttcgttaaatgtgttacgcattagtggtgttaatatatatagagagacaattgcaaatataaaccataaatgggtagcatctgatgtagttccgctaacattaacataatttaaaaagttaacagtaggcactgttgtaaatnnactgataaaatatgtgtcatacagataataaaagataagccaaaacaacaatacagttaatatcccttnggatttattaatgatgtaatccacctgattctcatgcttgccgtttaataagaaatagccactgcccatacaaaacaacgagacccccaactgaccggcctgctaacaaatacataaccccgtcattattattgcgcaacacgaaaataaagcaacgcgagaattaccaccaaaatatagaacgatcttcaatcaattatggacaatccgtgattttct

SEQ ID NO: 3898 - DNA, 659 bp, Photorhabdus luminescens
  misc_feature (304)..(304): n is a, c, g, or t
tggtcgcgccgctaccggatgcccatacacaggcagatatgcgctcatcgacggtccctctgtggattatgtctgcaacggagcctacataattacaatgcccactcggtactcatcgttggggattttgtcggtgcggcggcggatatgctagtttcgacgctggatcggttacttctacccgctttggatagctatttacatcgggcgtctgtctgttgaagctcgcttatttcagattgctgaggagttaggagttttcatttatgactgaatctatgctagccaaaagacgcagcgcggntattgcaagaggcgtgggcgtgaccacacaagtctatgcggagcgtgcggaaaacgctgaaatttgggacgttcatgggcaacgttatatcgattctgccgccggtatcgacgtggtgaataccggacactgccatgcgcgcgtcatcgcggtgggcagagaacagatggaacaggtacccacacctgtctgaaggggtgccctactaaaattatgggggggtggccgaacgcggtaaaccgattggtgccccgtgattcggctaataaaaccgtttttgacactacccgggccataggcggtggaaaatgcttgaaaacaaccgcacctgccgattatcgggagcaatggcggg

SEQ ID NO: 3899 - DNA, 750 bp, Photorhabdus luminescens
aagcttgctggcagtatgaattgggtgattacgccaccacgtttattcagaccggtacttggaatgaccattaccgtggtttgcaagtgggagaaactctgcaactcaatttgctccaaatggaagcggcatatttagttcgtcatgagcgccgtcttaatgtgatccgtactgtgtcgctcaaaagcctattgggtgatgatggctttggtaagttaaaaactgagggcaaagttgactttccattaagcgaaaagctgtttgacaacgactatccggggcattatttgcgccagattaaaaccgtgtcagtgacactgccgacgttgatcgggccgtatcaaaacgtgaaggcaacgctcacccagaccagcagtagtacgctgctcacagcagatatcaatggtgttaaacgtctcaatgatccgacaggtaaagagggggatgcgacgcatattgtcaccaatctgcgggccagccagcacgtggcgctctcttctggcattaatgatgccggtagctttgagctgcgtttggaagatgagccgctatctatcgtttgaaggcaccggtgcggtctccaaatggccgctcaccttgccgcgttcggcggatgagcatattgacgacaaaacatcgaacgcggatgagatgcacgcctcactgttgccgatatggatgatgaactggtgcaggtgcctcataccgcctgcgatggggcgcccgctttatcaccatcccatattactc

SEQ ID NO: 3900 - DNA, 634 bp, Photorhabdus luminescens
  misc_feature (606)..(606): n is a, c, g, or t
aacctcagcccggatatcgaatttttttaaatgctattttagcggggtgggaatattcaccatgatattaatcggtgaccacgatggacgtaacccgctcggctagcgacctatgcggctattacatcataccgcccataccgcccatgccacccataccgcctgctgcacctaaatcagctttatcatctttaggcaggtcagtgatcatacattcagtggtgatcatcagaccagcgatagatgctgcaaattgcagtgcagaacgggtcactttggttggatccaaaatacccattgcgatcatatcgccatactgttcagtcgttgcgttataaccgtagttgccttcacctgctttcacgctgtttgcgataacagatggctcttcacctgagttgtcaacgatctgacgtagaggagcttccatcgcgcgcattgcaacacggatacctacgttttgatcttcgttatcgcctttcagaccaacaatagccgctgcaacgcgaaccagtgcaacaccaccaccagctaccacgccttcttctactgctgcgcgagttgcatgcagagcatcgccaacgcgagcgcgtttttctttcatcnaacttctgttgcagcaccaacttgatac

SEQ ID NO: 3901 - DNA, 765 bp, Photorhabdus luminescens
atctatatcgccatcatccaaaacatcatcactacattgtgtagagataaaattagccaccaccgatgatatcgttgacgattgacgcaaaaccttatttaataaaccaatggaaataatattagggggaattcccgtattcaattcctgacttttttcatattctccttgagaaacaacattagcatcctgactaacagaaaaagctttaaagtcatttttattactcatgagttctccttaaggaaaaaacttatgttttcattaaataaaactttgaattaatgaaaataaaaatatccacttgatcatcgtatataattttcagatcgcatttcaataatagcccttttttgataaggagtgatgaaatatttttataacttagagaaattaattattttcttatagttgatgccgttaatatatcaatgcctgaagccaaatttatacctaagctattcatttacattcagcatccgaaagtgcctctatttgaactattccccaaaattcaggtaagcaaataaaataagctaccatattttaatctgagttttgtgatgccgctctcataataaaaaaccgccagtcgcaataggattgatcagcttataaaaacattatcgaggatttattagctcgaattattcagaatacgtctattcttactatgtcggacaaattctattggcaatacttattaaacctactaagtaaggggaaattatctgtccttcagaaacaacctcctcgtttgaggat

SEQ ID NO: 3902 - DNA, 673 bp, Photorhabdus luminescens
ggtaccagtaactaaagtgcctaattgctggttgtgggtagatggtattaataaacctaaattatggttttactcgccggtagattattggcacagcgtagaaccgctgccgactagctactggactaaagaagttgaaatgattcatctggcaaatgcaggagatattaattcagcgttaagcacttatgtaaaacagaatgttgcttacatcggttgttcaccgcaaagagcaaaagagattggtttctctgaacgcaatattaatccaaagtctgttcttgattatttgcatttccatcgttcatacaaaacagattatgaactagtctgtatgcgtgaagcacaaaaaacggctattgtcggacatttggcagcttatgaagcatttcaggctgggatgagtgaatttgatattaatatctcttatcttatggcaacaggtcatcgtgatacagatgtgccttataacaatattattgctatgaatgagaatgcggctgttttgcattacactgcattgcagcacaatgcacccttcgatattcgtagtttactgattgatgctggcgctgaatataatggctatgcagcagatttcacccgcacttattcagcaaaaagtaataatgatttggcttctttaattaaagatatggatgctgaacaaaag

SEQ ID NO: 3903 - DNA, 757 bp, Photorhabdus luminescens
  misc_feature (606)..(606): n is a, c, g, or t
aagcttaacggtaaactccaggcgaaaagcctgacattgacacaaggccccaaccagattgatttcaaacgcggaacccttgttcccatgacaggggaagattatggcccttgggaagcgattgataccgggttattagggggaatgtatgccaataaaatccgtctggtgagtaccgagccgggtaaggttgtcaatctgaccaacctgacggcaacccaaggcgacatcagtctgacggcggatggcaaggtgactctgggggatgtacaggccaaaacggatatcaccgttaacggtaaagacattgacatggtgaaaaaaagtcatatgcaagccggtcaacatctgatattgacaaccgatacattgcagagttggggacgaattcgtgccgacggtgatgtcactattaaagcgaaaaccttgtctttagatgggggaaatatcaccgccgggaaccaggttctgctacagggaaagaacagttttacggtgcgtggcacggatatttcaggtcatgacattaccttgattgccaatagttataatacttctgtttcacctagtgacacgtcggaaagcacacaagtattacctattatntctgcggtaatacgctgcgtattctgtctgacagggcatatcgctttcagatacgctaataaaccgggcgaaaaatatctttatggcgagtaatgggtggatcggtattaatcagcatttggcggcggtgagatattgatcttacgctgag

SEQ ID NO: 3904 - DNA, 656 bp, Photorhabdus luminescens
  misc_feature (48)..(48): n is a, c, g, or t
  misc_feature (503)..(503): n is a, c, g, or t
  misc_feature (568)..(568): n is a, c, g, or t
tcgctttttttgtcccagctactgtaagcgtccttaacctgattccantggacatcattgcggccttgaagatttttcagccattccgtaccgggagtgtgactgagtacccctaacgcgtcttccagtaactgcccctctttcactttcacatccgcattgatgcctgtcgccgcctccaccgtcagcgtaccgccaacatgcactgaggggattatccaagtctcctcacggtgacctttatcgcgctgtgtaataaaaaagccttttgatgtcgtgatgctctgctcaaaatcaatattgggcatcgccttgaagttcactttccctgtctggctggtgattctcgcgtttttaccggtttctatccgactcgcttccaatgtcacctcatcttttgccatcaggttaatatcacccccggccgtaaattccgtgacttctgtggtcttcttgatttgtattctatgttcggttttagacccaaacactttacacgactntatgggccccaaacctttacagcttttctctgtttcttcccggctgtaaacttcttccatccgcngcccatagagaaagccacctgttgccgcatatccatacccctttggcgataaccgccgcgcttgaataaaaactgccctgagagcaat

SEQ ID NO: 3905 - DNA, 750 bp, Photorhabdus luminescens
aagctttcagaatgtacctgttgttggtgaacgtgtttatattccagatcacaaagtatactttgcgtcctttgataacaaagaaacagcatattatttgtgcggattattgaattcattaactgttcaggaatggattaacagccacaatgtatccattcaagttgcggatgtattcaaacatctatcattacctaattttgatattactaacacgatgcatactaaccttgcagagcttgttgaagaggctcatcagtgtcacgacaaaacagaacgccagaaaattatcaagcgaataaaatcggtcgcggaggatgttttgatcacctggagtgtaacgctcgtagaataactgacaaagataagttggctattatggcaaacatccttaactggcctgattatatcgtcctgtctgtctccgaactggagcatgattaccgggtacatgtagggacggccaacccacctactcactgcatccactgcaagcatcctgaaatcgttggctttggccgtcgtgatgaggtgatcatggatactcctgtcaatggcaagcggacagggattatactgaatcgccgccgctaccgttgtcaatatgttgtaagacctttatgggaccagtaccacacaaggatggtaagcggccaatgactcaccggttgatccaatacattgagcgtgagagtctaccgcgcaccttttccagccgaccagaggacctacgggtggaccaaagaacgt

SEQ ID NO: 3906 - DNA, 654 bp, Photorhabdus luminescens
attcaacttcgttacgtgtgactatgacggaaattcttgatcgtcacccatcccccggtcgtgatcgcagtgaggatctttattttggtgtgctaagtttccccgtagagagccacattatttactaccgggaagttccgacgggtattgaagtgttggcggtgttgcatcaaacgcaagatccacataatcatctataccctatggatttcaagatgcttcgcgaccggaagggattaaatcccctggagcatggagaacgatgtgaccggggtgagccattgcagccaacaaagacgcaacttgaaagatgacgggtattcaatgatgagccttaaacgtgggatcccttatttaattccgattagactaaccaatcagctttcgtatcagatgcttcagtgactgacccgagctccgtccgcgtgagaatccgaattcccaaatcttggctacgctacgtcccaagacgcccgaagacagagccgatactgtcccattttgtccacgtactttgcagttcctcgtgtcactcgtctccggagccttgaggttgaatccagtctccctttggcgcgtagatatgttatcgccttccccgctttgagtccggctcttcagccccttcttcccgtgtactcccgtttttgcccg

SEQ ID NO: 3907 - DNA, 759 bp, Photorhabdus luminescens
aagcttgagcgtaagaggtaaacagcatcgaccagtcagttggtgtgatactgatagcccctttggaagaccatttatcggcgctgacagcctcatctttagaattgtttcctttatagttgtcatagcgcgtacccgcgacaatagagactggcaggtcgcgcagcgttatctcatcttgtaaccagccggaataaaagcggatatccgcgtcaggaaagctatctgtattaccatctggggtctgtttctgtttgtaagtttcaccaccgtaagtaaattgatgtgccagcgggctgtctgtccacaggcgggagcggttttccaattttacgccataggttttctgtttacggccttcgaaacccttcgccttagtacgagcattaatagtgatatcggaataatagaggtcagttttggcatttaaccaatcatattctgctggatttaattggtagctgagttgggcatcacgttgagttgtcgtgcggtcagtccaagtgctaggatttttattttttccggtgagtgtttgtggatttttaggttgattagcctcattacggtaatagcgtaattgactgctcagggactggttgtcatcaattttccaactgccttttgccattaagttactgataaattcatcattatcgccaaccacaccaccaccgtgacggatgttacctgaatcacgggtactgaaggcaaatacaccatccagggattccgattttgcaaaaggtgcaccaccaa

SEQ ID NO: 3908 - DNA, 656 bp, Photorhabdus luminescens
atcaagagaggattgcagaacgtccaaatgttcgtgatgcactgaaagcggaagggttaatttgatttacagataaaagaaccgttccacacaatatcagtggaacggttaaatatctttacccgtcatctttcaagatgcatcttgaaatccattgggtattaatctaactgtattgcccaaaatttatgattaggtgccaccattctgtcctgagcagccacaatctgtagttcgtattcgcccatctctttggttgttaccatcacttcataaaccgcagcagcgacatgttcgagggcggtttgtaaagactcaccttttaatagattaaccaataacaagccgctggttaaatcaccaacacccactggctgccgttcgccaaagtccaccaaaggccgactcacatgccagctatgttctttagtcactaatagcatttcaaaacgatcagtccgataacccgcgcgactaaggtgtttaaccagtacaatatccggccctttatcacatagtgtccgagcagccataacagcctgttctacattagtcactttctgcatactgagtgtttcagcctccagcaatttggccgcatgatttcacttacaggaagtgcatctttacacaaaattcacccacccaggcacact

SEQ ID NO: 3909 - DNA, 765 bp, Photorhabdus luminescens
  misc_feature (6)..(6): n is a, c, g, or t
  misc_feature (484)..(484): n is a, c, g, or t
  misc_feature (665)..(665): n is a, c, g, or t
aagctntatcggctaaaatgatagcctgctgagacaactcatcccccttaagatggggataaccagcgatgctatacaaattagccgctttcaaccagaaattgctcgcttctgggatctgctctgcctgcaacgctctctgttgccacaacatcgcctgatgtgaccactcaaaaacccagttacctttacgatacccaatcacagtatccagtaaattatcatcactgcgctgtgcgtttgtcatggcaatccggcacaacacttcttctatttcaaacggatcaatttctcgccaaatccacatcagccggttaatcatacgataccagctaccatgactattaccatctaacgtactgtaattacccgcaattaaccgaggatcgcggtgctttaccaacgtggaagtttcctgatgtttttgtcttggcttaaaaagtgattctgaaaggttccgatttgccataactaatgctgattntatctaccttcacaaatgggtggaacgaatactacacccatatcccaaggttgctcgatccaagtatcttgaggaatatcaacaatataatcatcaaccaacggttggcctgccggctttgcaaaaatagtcacaaaatgggctttgggatatatttcacggatggcctgagccgtgcctnccgtatcaaccagatcatccacaacgatgaaaccttaccattgccttctgttttttcagagctttcagctcacgttgattatcatggtcatagctggaaa

SEQ ID NO: 3910 - DNA, 784 bp, Photorhabdus luminescens
aagcttggttatatgcaggcatttgtccggtatggtatgaaacatcatgctttgggcaaagaatttacggattggttagtggcgttgcaggatcaggttaaagaataattttacggaaatttagggattatatgaaagttacggtgtttggtattggctatgttggcttggttcaggcggcggttttagctgaagtcggtcataatgttctttgtattgatatagatgcaaataaagttgaaaatttgaaaaatggccaaattcccatttttgaacctggattagctccactggtgaaaaaaaattatgaagaaggccgtctgaattttagtacggatgcaaaggccggtgtggcacacggtaaattgcaatttattgctgttggtactcctcctgatgaagatggttcagcagatttgaagtatgtgacagcggttgctcgtactattgcggaatatatggatagctataaggtgattatcgataaatctacggttcctgttggtaccgcagataaagttaatgcccgttgtaatgagactctgcgtcaacgtaatattgatattccatttgatgtggcttctaaccctgagttccttaaaaaggcgccgctgttgcagattggatgcgccctgaactgattattattgggtgcgacaatgacagagccgttgacctaatgtttgaattggttgaaccatttaatccgaatcatgatcgtatgattgcgatggatatccgtaccgctaactgacaacgctgctgctactcgctgttgcaacga

SEQ ID NO: 3911 - DNA, 674 bp, Photorhabdus luminescens
  misc_feature (412)..(412): n is a, c, g, or t
  misc_feature (452)..(452): n is a, c, g, or t
agttatgatagaaaaatgaaactttggaaagaaaaagataataatcttgaaagttatcatatagccgagcttcctccaattgtttggccaagatcttgtgcatttcttgatagtgataatttagtttttgcgtcatttggtgatagttatgttcaatataccatttccactcaagcatggcatcaagatcatgttagaccaacatacggttccaatgctgtatacgtttcaggcaaagacatttggagtgttggtgatgctggtatagttttctgtaataataggccatttgccgaaatgggaagtctgtgtaactttattatcgaatttgaaaatgtgcttattaccggtggacaaatgggaaaaatatttaatgctcgtactggtgatattatatatgaacatcattccnctctaaattgcgctgctgtttcatgggaagataatcaatnttgtcttgttggtacatacactggagaaagtattggtttaagaaaaatagctggggatatttgtggtgataatatagctgtcattacataaaaacgcaataaaaggagttcttatatctaaaaatttgttttttttgatgtgccaatgcacagttgattaatagcattgagactttcatgtatgctatattccaaaccaatgaaagatgctatggatggatg

SEQ ID NO: 3912 - DNA, 769 bp, Photorhabdus luminescens
aagctttaagcacagttatgcaggttgttagtgcataggtttattgattgtgtacaattgatgagtaccaaagcgcaatttttgagtagttcattttttcgaacctttaggttcttagttaaaaacaacaaaataaggaaaatatagaatggctaaggggcaatctttgcaagatccgttcctgaacgcattgcggcgtgaaagggtcccggtttctatttatttggtcaacggcatcaaattgcagggtcagattgaatcttttgaccagtttgtcattttactgaaaaatacggttagccagatggtttataaacatgccatctctactgttgtaccttcccgcccagtttctcatcacagtagcaatacgagtgtaggggcgagcgtaggtaattatcattctggtggcgtttctgctccggcagcacaacaggaaagtgatggcactgaataagtttgagatcagtaatagaatgaagaaaaacatacgtaggggggtctacctatgttgtttcctggagttctttactcagcctgagacgtcgacctttgtttgaacgttatgaaagcggcgaaccagccgctgtggtgcatgtttttttctcccaggataaagacacagataatctcagtgagtttgactaactgggaactcctgctggtgtagttactgtgcacattggcccggggagcaggaaagcccttatgcgaaatatcgtgctgggaaaagtaacgccgaacacatggtgaggcgggcaggctatgg

SEQ ID NO: 3913 - DNA, 681 bp, Photorhabdus luminescens
  misc_feature (98)..(98): n is a, c, g, or t
  misc_feature (106)..(107): n is a, c, g, or t
  misc_feature (135)..(135): n is a, c, g, or t
  misc_feature (213)..(213): n is a, c, g, or t
caataaaggtgtccagatccgcaacgcgctgatcattccagataccttgacactttcagatgcactggaaagttttaaagcggcaggtgaagatttcnctattatnntgaatgaatatgcattggtaatgggtgngattacccttaatgatgttatgaccacactgatgggtgatttagtcgaccaaggacaagaagagcagatcatcatccntgacgaaaattcatggttagtagaaggaggaacacctattgatgatgtacagcgtgtactggatattgatgattttcctgattcaagtaactatgaaaccattgcaggtttcatgatgttccggttgcgtaaaattcccaagcgtactgattcagttaagtttgctggttacaaatatgaagttggcgatattgataactacaaaatccatcagctattagtcacaaaaattactggtactctaaccacggaacacacgcaaaaccagcctatcagtgatgataaataaaaacgggctattttttgagcttaaggccggttagtatcctcaggttacgcgccacttatttgctattttggtggcgcaaatacacccagtatgccacccggatgcttttgcggaacctacccaatttcggcctgcagacgtagcacctgctgattgacttcattattacattataacgg

SEQ ID NO: 3914 - DNA, 785 bp, Photorhabdus luminescens
  misc_feature (237)..(237): n is a, c, g, or t
aagcttttttattggcttttttaaaacttttagaaacgacaaaaatattattcaatacctttccggcgcgtcatcgcgatctttattatcgggaattattgggtttaacgccgagaagtgcccgagcggatcgggtggcgataggtattaccttgaatggaggtaacgcagaatatcttgtccctcaaggaacttactttgatgccggacatgatagcgctggcaatccattacagnatgtgtccgagtcgaatgtattggtgaatcaaggagaattgactgacctatattggtatcgaaaagagggcgatggttggaaatcggcactgtcactgaatcttgccgatagcattaaattacctgagaacggtattccgggtatttagcccaccacctaatgatgctctagttctgtccggctacttaatgacttccccttcatttccgatgttaacatgagagctcacgattaaagtgtcatcacgcccgaacctgggatggcgaatctccgcttatcccgcttatcccctcccccacactccctggcttttcccttgtctcgacactctgctcccccatcaccacctcaactccgatcgcatgcccctgctccgtcctatacccattactgtttccttgcaaatctcactctttgatccattttacccatatctgtcttcctaccccgccctctttctccccccgatcttccacccacacccagtctcctcgcgtccctacagttcctttccccctacctccttctcccctatctcgtttttctc

SEQ ID NO: 3915 - DNA, 719 bp, Photorhabdus luminescens
  misc_feature (125)..(125): n is a, c, g, or t
  misc_feature (135)..(135): n is a, c, g, or t
  misc_feature (157)..(158): n is a, c, g, or t
  misc_feature (214)..(214): n is a, c, g, or t
atgtatcagtcttagcaaacgaatactctgacggacaagcactgcaagcgctaaaactactgaaagagttcctcccaaccagctatcatgaaggggccacgaacccagttgcccgtgaacgggtncataatgcancaactattgcagggattgcatnngctaatgccttcttgggggtatgccactctatggcgcataaactgggttctgagtnccatatcccgcatggcttggctaacgcattgttgattggcaacgctatccgctataccgctaacgataacccaaccaaacagactgcattcaatcaatatgatcgaccacaagcccccccggcggtaccctgaaatttgcccatcatctcggtttattcggctacggatgaccataccgtgacaaagattgaaaccctgcgatcgctggtagaaaacctcaccgctgagctgggtgtgcctacatccatgcccagaaacgggccgtacgaaaaagctggcctctttggcaaggctgcgacagaagtctcttaaaaatcccttaacacaaccaatgatccctaccgtatacccccgcctaccccgtatttgcctcgtccaaatcacaattaattcctaacattcctactatgtccgcatatattctctcatgctcttctgcgtcgtatatgcgcctcacgaatctgctgatccatcgaaacaaaaactgttgatgagttagaagaa

SEQ ID NO: 3916 - DNA, 799 bp, Photorhabdus luminescens
aagctttaccgccgatggcaccaccaataccggcagattctaccgcctctttggctatcagtgcacctttttcccaagctggcaacgagttatacaacagccctaaatcgttctggttttctgtcgtcacaaactgactgatacgatgggaatcttcttctgataagccaaacatccatctcagaccactgatggcatccgctgtttttattcctccttccatttcagcctgataggtcagtgtgcataacccaccgttcccggcacagtgagacaacatttctgcccgttgtgtagcgctcagtttgttgtatttgttccagattgcttcggtaggcgttccttgcttattggcttcctggagttctctgaccagattgcaggcattcatggagtccacgcggttaaagagaataacaatttccccggctttagctccactgttagcccctttggcgctgctggccgcaatggtccccgccaccctgcccatgattgcgccacctgcctgaattttgcattgcatccttgactgtcccatccattgttccctctgtctcccctgcggctaatgcttcctactccgcccctttgcgctaacccacccccattcgacaccccattaccccgaaacccgccaacttggtctatacctctcccttgttgcccattccctcttgactaaataccccctattaacccggcccattgatccgaacctatcgcctgaatttatcgcgccgccctgcatccactttcatccccttcccacattatccactttcttcatttatattca

SEQ ID NO: 3917 - DNA, 697 bp, Photorhabdus luminescens
  misc_feature (107)..(107): n is a, c, g, or t
attcaacttcgttacgtgtgactatgacggaaattcttgatcgtcacccatcccccggtcgtgatcgcagtgaggatctttattttggtgtgctaagtttccccgtngagagccacattatttactaccgggaagttccgacgggtattgaagtgttggcggtgttgcatcaaacgcaagatccacataatcatctataccctatggattcgaggacccccggccgggcgcgtaccacctattttgtcccacctcaacaccccgcgcagcaactttattagccctcgatttcatctgtccgtgcctctttctaccttcttttctctctcctgctcccctcgcggccgcgttaaccgcttccctcctccgagcccccgttcatcgacgatttttagctcttgccggtcctgcagttgccctgcatggtggatattgaactgcctacgaggtttcctatccactcaccccaacatcaccctatacatgatctatacttcgtgtcctgatcattattccgctctattccgttgcgtatatcgagtcttttctgttccccctcgttctcctattctttttcccatcgcgatttgtccgtcactacccgtatgtcgcctattctttctgatttattatcctgccatgttcgtcatcgccactatcgtccccatgatgccctgtcccttagtataataaaaaa

SEQ ID NO: 3918 - DNA, 748 bp, Photorhabdus luminescens
  misc_feature (6)..(6): n is a, c, g, or t
aagctnggctagaacaaaatcatattgatacgcgagaggggaaatcgttgatcgctcaacaggcagaacaaggcatcacaccggttcttctggcagcaggaggtcaagcggcggcagtgctatctattcgcgatccactgcgtgaagatactatgactgcattgcagcgattacatcaccaaggctaccgtttagtgatgttaaccggtgataacccagtgactgccaatgcgattgccaaagaagcgggtattgatcaagtgattgcaggtgtattgcctgatggcaaagctgaggtaattcagaaactgcaagcagcaggtcgcaaggttgctatggtgggggatggtattaacgatgctccagccctagcgcaagctgatgtatgcatcgcaatgggtggtggcagcgatatcgccattgaaaccgcccgcataacgctgatgcgccatagcttacatggcgtggctgacgcgggtgctctatcccaaggcactctcgcgcctatgaaatcacacctattacgcgccctatttacaccaattgcggattcccatccgcggtggcgtcgctctacccctcccttggaccctcgcaaccccgcctttcacgtgccgcctggcctatttcattcctgttcgactacgctatgccccccgccgtgtacccctactactaacaccaaccactatgccgcttaccgctgtaggctcacgcccaacctcctacgcccgttcccttcacttta

SEQ ID NO: 3919 - DNA, 667 bp, Photorhabdus luminescens
tctgatgataatttgacaagctcgtttgatacccaccgtgacgacataatagtcgactcctagccgattttctttatattagaaaaattgatctgttgatggtcagtattcatcatatagcattggttgtataaaaatgcaacatttgatcacatttaggaacgcaacaatgacaatatctctgagaggtcatcaccttttgtgtatttttacctacgctggcaacggatattccactggttttgttgaaaattacaataggattattcctcgaattcgggacgaggatatcttgattgtggcagggccggatgacatatgtattcctttgcttggagaagaacaacctcattgctttggcgagagtgtcattgtccgggatagtcgagctttggacgctgttggttctcttatgggccgatcaattgatataggtcatacgttgaggcttgatgagacctatttaaaacaggcgcgatgggctttcaatcgcgggatcataagatctgcttgtataggctgtgaatgggaactcctttgcactccaattgttgtggatgattattcttcaccgcttcttaaaccgaatagtggaaagagtgaatgacatatacaggcgtttgaaatttagccacggctgatattagttgaatggtgatcacctact

SEQ ID NO: 3920 - DNA, 780 bp, Photorhabdus luminescens
aagcttgcaaccgggctgtgttcaggctctacgacttaggccaagaagaacgatctgccctcgggggaaatggagaataaatggcgctcgatctcgtcgactacgaacagaaagcccgcgaagccgtgaaggcgttttggggcaaccgcgaagcagcaagacaaaaacaaatagagtcgggcaaggccgaccaaggtgaacgtgccggagtcaccgctggcaagaacatggacgggttcttggctttggtgctcgacatcatcaaggccaatgggctagcccatgctgagattcaccagaaccgggcgatgctgaccctgcccggatattttcgtccgactaaactgtgggatcttttggtgctctacaagggacaattaatcgcagccatcgaactgaaaagccaagtaggcccctcgttccgaaacaactttaataatccaactgaggaagccatcgggacggctcatgatttatggacagccttccgtgaagaagctttccgcaagcaaccgcgtccatcttgtacggcggatgatgatggttgaggatgcgtctgactcttgtaaatgcgtgcgcgactcgtcgccacactttcctgggttccaggcattcaacggcgccgcatatctcaagcggatcgacctgctgcccgagcgactggtgcaggagccgctttacactacccgttcccgtatcggtgacgaacgcagtgcactaattctcgtaactagcggaactggttccatcatcccccttaaaccttctcgctatttatca

SEQ ID NO: 3921 - DNA, 681 bp, Photorhabdus luminescens
  misc_feature (411)..(411): n is a, c, g, or t
taacccattattttacttagatttagccaacattttctcagcaggttggtgcgctaaatcaagtgcaatcttcactgattcatcaagatagggatctggcccctgataatctttaggcaaatcatccagtgaagttaacggttttttaccttcgcgtttaaagcgatcatttatgcgattcaacttcagagcatccgcttctttattttctttttctctttgtgcatagttcagagaaacaatatttttatgctctttcagcgccttatagtgagcaatatcctcattgatatacttgaattctggatcagttgtaatgcggatattgtgaacaacattcaactgaggaaccaatgcagcaataactttagaccctgtataacgggcaggaggaatgctatcccaaggcanagcattatcttcgaaactttcgccggtttctgccggatcaacccccgtaggcattacgatatcaggagtcacccctttacgctgagtactaccgccatccacacgataaaacttctgaatcgtatattggacagaccccagtgatggccaatcagggcgcatcatttgatcataaatacgactcaaagaacggtattgctgaactgtacccttaccaaagtcggctcaccaacaatcaacgctcgccctaatcctggattgctgcggcat

SEQ ID NO: 3922 - DNA, 776 bp, Photorhabdus luminescens
  misc_feature (485)..(485): n is a, c, g, or t
  misc_feature (580)..(580): n is a, c, g, or t
aagcttttgtttttgcttttttaaagttattagaaacatccaaccgattattaaataccttcccggcccgacaccgcgatctttattaccgggaattactgggactaagccccagaaaagcccaagcggatagcgttgctttaggcattaccttaaatacagataacgcagaatatcttatccctaaaggaaccctgtttgatgccgggcaggatagcgtcggcaacccattacaatatacatcagaaacagatttactagcgaatcaaggggaactgaccgacctgcgttggtatcggaaagataaggatagctggcaatcgacaatacctcttagcctctcagataacattgcattacctgaaaatggtattcaactttttagcccgacagccaatgatgtggcagtgctatccggttatctgattaaatcatctttattttctatgcccgaaggagaacgccatatcacattgacgctgganaacgattgggaaggtcaagctgaacatctcatcgctaaaatcagtacaggagatcactgcgtatcgctgtcggtaaatcctaatcgtactaacanacacactattgagcttgaattatcattccctgatgatcctatcacgcccccgataatcttgatggcctgacatcccacatacccggtattaaacctaggcactactcagaaactcctgtgggccaaattaccgggatgtgaatccatattaacggcacccgcacgtgccctcatgctctgatgcgggattgaccaa

SEQ ID NO: 3923 - DNA, 675 bp, Photorhabdus luminescens
ttttagcaaggtttgcttatccgccaatgtcgcaatgggcatattaatttgtaccattggttggtgcttaatccagactaatatatctcccggctctgccaagcaaaccacacgtaatttcggctgattcaacaaaatagataaattgcgatgtaatattttctttgcctctgtaagcaaagaaaaattgcgaattaataaacaagcgttatgtagccgggtttctcggattgtatccgctagcaagtgagttatttccgttgggttctcgtcatctggcagaagggctaaatcaagcgttaaggtattgatgccatgagatgccataatattactgactgctaattctctggcgctgtcctgttttcctctgagtatgattaatggctgtatttcgttggtgtcattcaataatattttcttaaatgaatgataaagagtttgcggataccaattatgtggggctggagtatgccaattagcacaggttattaatggcggtagaataacttgttgccccgataaaaaatgccataccgagttatgagttaaaaattgcgtttgtaaccagattggttcttcttgattattaagccgtaatagttggttgttgattaatgggtgttgcagaaaaacctgttctgcagaaattgccatcactttgacattggctaa

SEQ ID NO: 3924 - DNA, 751 bp, Photorhabdus luminescens
  misc_feature (599)..(599): n is a, c, g, or t
  misc_feature (637)..(637): n is a, c, g, or t
aagcttgaacctcagcccggatatcgaatttttttaaatgctattttagcggggtgggaatattcaccatgatattaatcggtgaccacgatggacgtaacccgctcggctagcgacctatgcggctattacatcataccgcccataccgcccatgccacccataccgcctgctgcacctaaatcagctttatcatctttaggcaggtcagtgatcatacattcagtggtgatcatcagaccagcgatagatgctgcaaattgcagtgcagaacgggtcactttggttggatccaaaatacccattgcgatcatatcgccatactgttcagtcgttgcgttataaccgtagttgccttcacctgctttcacgctgtttgcgataacagatggctcttcacctgagttgtcaacgatctgacgtagaggagcttccatcgcgcgcattgcaacacggatacctacgttttgatcttcgttatcgcctttcagaccaacaatagccgctgcaacgcgaaccagtgcaacaccaccaccagctaccacgccttcttctactgctgcgcgagttgcatgcagagcatcgtcaacgcgagcgcngttttctttcatttcaacttctgttgcagcaccaactntgataacagcaacaccacccgccagtttagctacgcgctcttgcagtttttcaccgtcgaatcagaagtggactctttgatctgctgattgatctgagaaacacggcctttaat

SEQ ID NO: 3925 - DNA, 661 bp, Photorhabdus luminescens
  misc_feature (642)..(642): n is a, c, g, or t
  misc_feature (661)..(661): n is a, c, g, or t
tgcaatctgctttgatgttcaaccgttctgtacgggaaaacgtaacctatggttctgctgtcagtagcgctgaagaagtctctcatgcgctgacaatggcgcaagctatgatgttggtggaagggttgcctcaggggctggatactttggtcggagagcgtggagcatcaatttccaccggtgaacggcagcgtctgagtgttgcgcgcgctttgcttaagaaatctccattacttatttttgatgaagcaacatcctcggtagatacaatttccgaaactcgtatcctcaattatttgctcgataaaatgccagaacgtacggtgatagttgtaacccaccgtgttgcgacattgagtcgctttgatctgattgtggtcatggaacaagggcagattgttgatataggaacaccgagtgaattggaggcacgcaatggcctttttcagcgtttactgcatcgtgaagaccaatctgtgccggaactaatatcaatggatcctaagaatgagtgaaatgatattgatgtcacctattttgctaaaaggagtcactttggactggtctgctcaccggcgctggagttgggaattctttgcaggcatgcaggaacataagctagcactgagtaatgcaaatggncagttccaggttgaagtcn

SEQ ID NO: 3926 - DNA, 756 bp, Photorhabdus luminescens
  misc_feature (621)..(621): n is a, c, g, or t
aagcttggtggatgtctcctccggctaactcagttttatcgtgaatttcagcaacaccgaaatgttcgtttaacaaacgatttactgtctgccacatggttcacctctctatgtcgtcaattactttatgaacaattatagtcagagaaaacatatgatcaggtaaaaaagatgattaacagggttatatctcaaaacagatataaccctttttgttattgattgggctcgttagagatttgtagggctgcttgatacgttttacgtttggattttgctcttacaagttttatctgactgtaagccagtgccagtgtaaagaagatagcctgaacaataacaatgcatggccccgttgcaccatcaatgtggaaactgatcagagtacccaggacactggaactgactgatgcaatgatagcgacaattaacattcggtcaaaactgcggcataacatgaaagcgataatgcctggtgatatcaacattgcgataaccaaaatcattcccacggcttgcagggaagcgacgatggtcatggacagcaggcaaagcaaaccgtaatgccaaagtttaacaggcaatcctactacgcgtgcttggttcggatcgaagcaatanagcatgaagtctttgcgctttagcagtatcaccgccatagtgatgcaggtaatcctaatgtttgatgcaactcatctttagtgatccctagtatatttccgaacagaatatgagtcaaatgttggtcggtatctt

SEQ ID NO: 3927 - DNA, 652 bp, Photorhabdus luminescens
  misc_feature (504)..(504): n is a, c, g, or t
gccggcaacaattccacctgtggctggccgtcaacagcaacaaaaacagaacgcaatgcttcatggcgggcaaacagcgtatcaagcgcctgttgccaagcggtgatatccaatcgaccacgcaaacgcagggccaatggaatatgataggtctcactcactccattaagctgggccaggaaccaaagccgttgttgcgcaaatgacaacggcaattggtgatcctcacgggatagcggaacgatagcgggcaatgccgcgcctgactcatcaaactgggtacgcatcacttcagcaaaagctatcaaagacgggaatgtaaacagtgtggacagcggtaattcaatccccaacgcggctatccgattcatcatcctcaccgccaacagcgaatgaccacccagtgcgaaaaagttgtcataccgactgatccgctcaacaccgagtaattcacgccagatagccgccaatgtggtttccatctcccctgacggtgcagcgtanatctgccgggaaaatcttcttcccctggggctggtaatgcccgccgatccagtttgccatttggcgtcagcgggaaggcatccagacagacaaaagcggctggcaccatataatctggtaaaaccgcacttaagtgcgcatgcagacg

SEQ ID NO: 3928 - DNA, 777 bp, Photorhabdus luminescens
  misc_feature (507)..(507): n is a, c, g, or t
aagctttaggctttgagttagtcggcttggagtttattcgtgcacgtgtttctacactgcggatttatattgatagtgagaatggtatcactgttgatgattgtgctgatgttagccaccaggtcagtgcggtattggatgtcgaagatcctatctcagtgctttataacctggaaatttcttcacctggcttagaacgcccattgttcacgactgaacattaccagcgttttattggtgaggaagtcagtctggttttacgtatagcaatgcaaaaccgtcggaaatggctgggcattattaaaactgtcgacggcgaaatgatcacggttacggtggatggaaaagatgaagtgttcgcactgagcaacatccagaaagcgaacctggtaccccacttttaaagttcggatgaggcaactaggatgaataaagaaattctggctgttgtggaagcggtttccaacgaaaaatcccttccacgcgaaaagatcttcgaggcgctgngaacagcattggccacagccaccaagaaaaatatgaacaagatatcgatgttcgtgtcagcattgaccgtaaatctggtgattttgacacttttccgtcgtgggtagttgttgaagaagtgacctcaccgactcgtgaaattacgctagaagcggctagatttgaagagccctgactcgatttgggtagctttaccgaagatcaaattgaatcagtaacgtttgatcgtattacaacgcacaccgcctaacagggtattgtacaaaaaga

SEQ ID NO: 3929 - DNA, 675 bp, Photorhabdus luminescens
  misc_feature (9)..(9): n is a, c, g, or t
  misc_feature (11)..(11): n is a, c, g, or t
  misc_feature (101)..(101): n is a, c, g, or t
tcagacgtntntttctcatgcctcccatttccagcatcagttaactcaagctgggttcgtcgctggcgatcgcttgttagtgattatccaaccaggcttantactttatccattgcttattgccattctggggctagggctaggtcccgttatgctagaacgcgggcttgccaaaaagcaactgagggagatactgcgccacagtcaattatcggcggtgatcactcaacctacgttaggaaaattctggtttctgctccctgaactctggcgactgcgacgttttgtcatcgggcaacgtatcttgggcatgaaagtactagaaacacccaatcaacatttaccattgagtagctttatctgccgggattgaccgccggatacaactgggttaattacctttacctcgggttctaccggcacccccaaaggcgcaaaccgcactcatgacagcttactagcacaactttatgccataacagcactttatgccgaggggaagaatgagatagatctacacagtttccccgctatggtgctgcactcattatgctgcggcaacagcagtattttgcctgattttgacttttcccatcccggaaccggcgattcacaggagatcggtaaagcagtgcaggcgaaagtattacatgcctaaccgcggctccgctataa

SEQ ID NO: 3930 - DNA, 769 bp, Photorhabdus luminescens
  misc_feature (661)..(661): n is a, c, g, or t
aagcttaccacccgatttattaagttcggaactaaatactttagcttcttgtaatccagacagaggcacttccatttctttagtaaaatgataaacattaccttgtttttgtccccattcagaaaaattaacattcaactcaggataaccactctgactagaattaaacataatataaaaatagtcacctgatgcataactattatcattgatagtcaccgcgacagaaactgttatttttccattgttttctttagcaccatccgcgagtgaaatattaacctttcctgcttcactcgatttacttttaagattaatatcacatgctacagatctaataatctctttcccaatcgacaaactattattaccactgagacgcagttttccactacccatttcagcaaatagtgtcattttctttgtcgcaagcccagggtaacttcctgactccagataaacaggcttatcaactaatttatatgcatcgccaaaataggctgacaacatatttgattgtgtcagatcttgcgtaggattagatttaatctgttgatagatatagagatctaatgacttttcacccaccagaggcacaggaacttcgttaaatagtaaattacaggagtacggataattcttttctcccgatgtattattntctgtttttactggcttacaaatagcagaaataactaatacaggctcagctcgcaaatccattaatgcaatgagttcaaaactatcattaattttactcttatcaccc

SEQ ID NO: 3931 - DNA, 671 bp, Photorhabdus luminescens
tgcattaaaaacatggttaatctgcttttccctaatactccaaagaaattctaatttactccttaatttctctttatcaaaggtatcaataagccgaatgccatgacggttggctttgtcttcaacacaggctccgacaccgacacccactgagccgatcttctgtttacctttatatttttctgacgctcgatttaactcggcgtgtaatggtaagacaatatggcatcgcggatcgataaatatatgagaatcaatatcttctttttttataaagtcgatctctttaaccagaatgggaagactgattaaagcaccttggcagatatataagttctttttgttgagtgatgcgggtaattgagaaaatgagcctcttagattaccatgttgcacacaatgacctgcattagcgccgccattaaatcgagcaatgttattgatattgccagataaatagtcaacaaattttcccttaccttcatctccaaattggagtccaactacagccgttaacatgaatctgttccttaattatttattgatttactctaaataatagttaaataatccagtttggataatatttttaagatgaataatctgctcttttaaaactaatatgctaactatctattcatacatcgttataaattatcccttttcttatc

SEQ ID NO: 3932 - DNA, 769 bp, Photorhabdus luminescens
  misc_feature (6)..(7): n is a, c, g, or t
  misc_feature (277)..(277): n is a, c, g, or t
  misc_feature (298)..(298): n is a, c, g, or t
  misc_feature (358)..(358): n is a, c, g, or t
cgagcnnacccgggaccttaatcacccctacggtgatgatgtgaaaggcaataacctgaataaaccgatttctgtaacccgtttatggatatgccgggtgcattggcagagtacgatcagcattacctgcgcaagatataggttatcaaaagtagatgtgttatgaaaataacatacttgatccaataaaatacaatagtactgtaaaggcaattcttagttttctttctggaagagtattggctaattttgctcctaacaatgctcctggtattgntggtattatgaataaccatanataattataatttaaaaaacctatatttccaggtggtaagttatttttatttaggccgantgatatcatacatattattaccaatccacattacacgcagactacaacagacgttgtccctatcgatttctcaatatctaagccactgctctcatattaacgcacaccaaatcgaagccccgccgaccaagacgatctcattctctttagaacagactatcttccctcccgaccccccttatttccatttgtcttccctcacctccccattaccaatccctccccgtgccctcctctcttccctaccatccccctattccctaccattctattctctatctgttccccatttttccattgccacattctcctcccccctttatcttttccttatcttcatcccccctcccaaatattcataccctctcattcatttcccactcctcctttatcccattccccttatttatc

SEQ ID NO: 3933 - DNA, 764 bp, Photorhabdus luminescens
  misc_feature (194)..(194): n is a, c, g, or t
  misc_feature (203)..(203): n is a, c, g, or t
  misc_feature (211)..(211): n is a, c, g, or t
  misc_feature (397)..(397): n is a, c, g, or t
aagctttcacaggtatctcgtgttacaaatatgagatgagcaggaatattctcctcccatttttttattttcttcaatactattttatcatcagtatagtcattcactattaactcagcatattgaccaagctccttagcaattgtttcatttaataaggaaccatttgtctgaataattatttttgcatttgnttcgttttntatttttngagcccaatctataattctcttatccatcaatggctcatttctaaaaaacaaactgatataaccattaaagtcttttaactgctccactattttatcaaatagttcttgctgcattttcccttgtttcattttgactttatttgtgggacaaaatgagcaggaatagttacagccacttcttgttnctatttgtataatcttagggaaatctggcacatctaattcactacctattagcctagataaacatgactctatgaattttgatttgatatactttctatttataccactaattgtgtttagaacaccctgttttctcattccactaaaaccataagcggactctctctttacctattagactaatctcagccaaataccctccttataaacttcgactcccattttaacgtaataacatacattatctgctttcccgtatacacccgcatctttcaagtgctccttgtcggtgcattcctcccccggtccataatctctctctcccgggattcgttcttgctgcctcagctctcaacccataggata

SEQ ID NO: 3934 - DNA, 699 bp, Photorhabdus luminescens
  misc_feature (104)..(104): n is a, c, g, or t
  misc_feature (134)..(134): n is a, c, g, or t
  misc_feature (157)..(157): n is a, c, g, or t
gctcaagccttagatcgacctcaatcatttattgctaaaattgaaaatggtgaaagaaggttggatgtggttgaatttgtgcatatagcacacttgctatctgncgattatgtgctaattttagaaaaaatttngttcaaaaaacaacctaaaaagntaaaatgatcggagcttataaaataaaaaatcccattttggtataaatcaacaatcgattgatatttaatcctaaatgcttagtaggattaaatatatggtttcaatctactctgatgaatatcaaatagttatcaaagcactccgtgaggctcgtatagcaaagggggtcacgcaagataatctaactcaagcgctagatcgccctcaatcgtttattgcgaaagttgagaatggtgaaagaagattggattgttgaggaatttgttcatatagcaacatttggtattattcacaccaggtcgttctcttagagagaatccccatgagaatacttgccgatactgctaataacttgctatctacgctagttgcatcaggaaagcgtaccgaatcacgggttcacatagttaactctttcaacctatgttgtaaaaactattccggtttatcctccctaaagttgctttttatacttcggcgttatgcaccatctatacacattctactcagctaacacttaatcggagctatttgcgtcct

SEQ ID NO: 3935 - DNA, 773 bp, Photorhabdus luminescens
  misc_feature (355)..(355): n is a, c, g, or t
aagcttatcctagatatttggcgtgaagtgcttgagcgggatgatattgatatgcaggctaaattcctggagtcgggaggtgactcattcaagtcgttagtggtttttgggcgattacgtcgtcattttccaaatctcactgttgcccaactatttaaatatccatccattgagtccttagccaaagtgctcggtggcgagagtacagctcccaataaaactaaggtggtacagttgtgacgacactatattcagatgatgcggtcgccataattggcgtctcttttcggttaccacaatgctcaaattggcgtgaattgattgatattttggctgacggtcgggactgcattcncccaatacctgaaagtcgggtggctaatactgggcacattcttacacgccatgacaaagacgcgggatggcttgatgaaactaccgggttcgatcaccgcccttttggtcttgcccacccgaaccccaatatatccccgccacaccacgcctagggtttccacttggctacagaccctatttgtccctgcggactccctctcatccacttttctcacgcccccccctccccattttttcgttgcgtcccgccgcccctttccagatcttccttaggcccgcttcgcgacccgcttaacccctatcctcctctctcatcccgcctttgcttgcttcatacgacgcggccctcccctaatttttctctccccccaccccactttcccccaaccccctatctcgctgtctctttttctcca

SEQ ID NO: 3936 - DNA, 769 bp, Photorhabdus luminescens
  misc_feature (296)..(296): n is a, c, g, or t
  misc_feature (356)..(356): n is a, c, g, or t
  misc_feature (691)..(691): n is a, c, g, or t
aagctttacagactgtataacctgcaagaatttgagtgccgccaccaacaaacccgatctgttttaatataagattagtataacttgatttctctttttccctttcaattattgcatattgctttactctgtttgctgtcaaacagaaagcttgttcttttaagtgatctatttcaaactgaataatctcaattgcaccatttgaagataaacagtgaatacgaacctgacctaatatatcctctacaaaaagatttatttttgaattaaaatccattcttattttactatgagtnagatagcgaaaagataaagttttcgctaactctcttaattcccttacctttaaatccagnaggttatctcgctccatatctccccttataaaaccgatttcttattttcaaatcacaaaacccattaacataacttatgtaacataacacaaaaaaacccatcaagaaacaatgaacagagctctatacataaatccactcgaataccgagtggattttcactacatagatagattacaattattaactcaagatccgcagcatacgacgcataggctctgctgctccccccagaattggccaccgccagtaaagcagataatactccggtcccatattagcttaccttaacgccctaccggagtatccaaagtcccctttatcgtcgccgaagntaattgacccatcctcattggccatcccctgaataacaccatcccactcccatgtcctcccctttcccctcatttcca

SEQ ID NO: 3937 - DNA, 661 bp, Photorhabdus luminescens
ctactattgcgaacgttgttcgtaaattagaggagcatggtgctcttgccaatactattgtggttgttgcgactgcttcagaatctgcggcattacaatacctggcaccatattcgggttgtgcaatgggcgaatacttccgtgaccgcggtgaagatgcgctgattgtttatgatgatttgtctaagcaggctgtagcttatcgtcaaatttctctgttgctccgtcgtccgccaggacgtgaagcattcccaggtgacgttttctatctgcactctcgtctgctggaacgtgctgcacgtgttaatgctgaatatgtggaaaaattcaccaatggtgaagtgaaaggtaaaaccggttctctgacggccctgcctatcattgaaactcacgcaggtgatgtatcagcattcgtaccaacaaacgttatttcaattactgatggtcagattttcttggaatctagtttgttcaatgcggggattcgaccactattaacccacggattttcgtatccctgtaggtggcgctgctacactaactcgttaacatatcgctgggggattcctaccggtcttgctcatatcggaactggcacctttgtccacttgcttgtacccttatgatccacccgtagcattggatcatgggtaaaagatct

SEQ ID NO: 3938 - DNA, 772 bp, Photorhabdus luminescens
  misc_feature (581)..(581): n is a, c, g, or t
aagcttcgccacgcataatggtgtatttcaacatcaggccagtcagaatagcgacgacaatgcccaatatataaagggaaaaaacaatggttgccccgtttttgccaaagaatgcggcggtaaatacggcaaagatggctaatcgtgcaccgcaagacataaagggtgccatcataatcgtgattaagcgttcacgcggcgcatctagcgttctcgcccccataatggatgggacgttgcaaccgaagccaacgatcaacgggacaaacgatttacccggtagtcctaaaacttgcatcagacgatccatgacaaacgcagcccgcgccatataaccggagtcctcaagaaaagagaggaataaatacatcatgccgatttgtggtactagcggcaaaaccgtgttgatacccccaccgagaccttgtgcgaggaaaatcgtcagccattctggaaaacttaaggtatgaccaagccattgaaccccatgaatgaaaatagcaacagaaccactgtccaagataggttgcagcgcaccaccgatattaattgccagcacgaacattaaatacataacccgncaggaaaataggtacacctaaccaaccactgaggataattctgctaattgcctgagtgagtcctgtttggcatggctttctgggtatcaatcacggacatgcacaatgtattgatgctttgatagcgcgcatccggaacgaccagttcaggctctccatgtccgtgttgttgccaacgttctttggattaa

SEQ ID NO: 3939 - DNA, 671 bp, Photorhabdus luminescens
  misc_feature (572)..(572): n is a, c, g, or t
caacagagaatattgatgattttggtagttctgtatttgctgtatcttacgatgatattgttagaatcatcggagcaaaacgacgtatcttaagatatgataataatggttgtggttactgggaagatattcctaaacctgatttctatgaaacaaaaatttataaagatgaagttaaagaaataatttccaatataaaaaaatattatatatcattgtaatatagtctccatatataaccccaactacagttggggttatttggaatggcagctccggagatattaacaatgccttaacaagcaaacaggtgccaagtgatattcagaaaaatctaggagtgaaactaaaatgatttatggtgatccatttttattttctcttcaatttgacattgttgatgttttcgaattaagaacaacaattgacttttactcaaatatgaaaatagatgagttggcatgtaatgatattccctttgatcctattaccttatacagaaatgcagaaagttattttacaggagaaggagaagatcttattgatggcttgtttgatatgacctgtactgncatgggggataatggctattatatttactttatgaaaacaagccaaaatgattgcctaatttgaagtgttgatgatgggaatccataaaggagacattt

SEQ ID NO: 3940 - DNA, 745 bp, Photorhabdus luminescens
  misc_feature (599)..(599): n is a, c, g, or t
  misc_feature (636)..(636): n is a, c, g, or t
tagcgttattagaaaccgctatctgctcacgataccaggacttagcctgtgccaattgctcctcagttggtgtgaatgccatgtaattactgattaaagaggttaaaagcgctggcagactctgagtgtaaccacttactcctaattgcagcccctgagatgagcccgtagaaatattcattcctgcaacagaagcctgataactaagctggtcaagggaaagccctgccaaataatcaagcaaagaggaagtgacctgctcacgagcgctattcaaaccttctgcgttgcgcaaatcaagcgtaatgctggctttaggttcatcagcaaaatattggctcggcatataaagcaagcggacattctgctgttcaacgatcatttctggatgttttttactcttatctgcttttatcagcttcaaatcgtcaggaatataaggatttggtgcgggcagagaaaagctcatctgctcctctaattgctgccatttaactcgttgctgcaatgtaattcgatcaacctgataaggtgcctgaacaaaataagcctgtttattgtgtggctcttttggactgatataccagattcttgcattntcaggtgttaactcagcaagccgattggcgattgctntcgggtcatagttatcagctaaataaccggcattcagtacattggaaacaggaactcgcaacatagcatccgataaccattcgatataatgcatatcacgaacaacgga

SEQ ID NO: 3941 - DNA, 656 bp, Photorhabdus luminescens
cccacatcagcttgacctgtccctgctagttccaatgctgtgccatgatcgaccgaagtacggatgaacggcaggcccaatgtaatattcactgctctgccaaaaccttggtattttaacacgggtaatccctggtcgtgatacattgagagcacggcgtccgcatgttgaagatatttaggttgaaacagggtatctgctggtaaagggccttccagcacgataccttctgctctcagactggctaacgcaggaataatgacatcgatctcttcccgtcccatatggccgccttctcctgcatggggattcagaccgcaaacataaatacggggttttgccaggccaaactttgtttttaaatcatggttaagaatagtaatcacttcccgcagactatcgaaagtgatggactttggtacatcaacaatgggtagatgcgtcgttgctagggcaacccgaagttcttctgtcgcaagcatcatgacgactcgctggcatccactgcgatcggcaaagaattcggtatggccgataaaaggcacgccggcatcattgatattccctttatgaactgggcctctgacactaatgctgaaaattccccgttaaacaaccctcacaagcttgtgccagtgtttcggtgacatatctac

SEQ ID NO: 3942 - DNA, 773 bp, Photorhabdus luminescens
aagcttttcaagataaggcagtagttctcttttacgagggagatccagcgatgccaacggttcatccattaacaacagatccggtgccgtcaataaagcacgaccgatagcaacccgctgcttttcaccgccggacaaggtaagaggaaaacgagatagtaagtgctcaattccaagcaaactaacaatgctatcaaattctggcttcatctccggcgacatcccgtattgcagattaccctttactcgataatgcggaaaaagccgggcatcctgaaaaacatagcctatacgacgctgctctggtgacaagcagatacctttttcaatatcaaccaacacatgatcattaaggacaatccgccctttccgtgggcgtatcaaaccagcgataacatttatcagtgaagttttcccggcacctgaaaggccaaaaacagccgtgatcccctcagtgggtagctgtgtattgacctgtaaataaagatcaccaagttgttgctcaaaatccagctctaacatgttgctcccaaacgtctcctgccccaacgggttaaccattcagaaaccatcagtgacatcaacgctagaataatggcaatgatgcacaaacgagccgcagccgtttctgctccaggtgtttcaatcaaggtatacattgccagagggatcgtccgcgtttcgcctggaatattggataccaaagtgatagttgcgccaaattcaccaatgaaccggcaatgccacacagtacccacaataccccaggcaaa

SEQ ID NO: 3943 - DNA, 648 bp, Photorhabdus luminescens
  misc_feature (10)..(10): n is a, c, g, or t
  misc_feature (205)..(205): n is a, c, g, or t
  misc_feature (529)..(529): n is a, c, g, or t
actgattcgnctagccaggcaagtattctggtcgaaagttgcgagaaaaaaattaaagaagccatcggttttttccatttactgtcttctatgcgtgcggaatcctttaaggtgtttcgtgcatatactgaaggcgcaagtgcgatccaatcaagaaactacaagcgtattgaatcactatgcagacaaccggatgaggatcggntgaactctattgcttacggctctgtccctgaagttcaagaaaaactgttggtgcggccaaataacttagaccttgcattgagtcaagcgcaacagagtggtcgtttcaatagcaacgactttggtgaggtcaaacaagccatgaaaagttttgctacgacgctgaaacgttggaagcaaacccattatggtcttgcgatgaagatgttgggtgagggctcgggtactggttacacggaaggcactccttatttggcttttgtcaaagacatccctgtttttgaaacccagcttgatgagtagattactaagatgaatagttcanataaaaccaagattgctattattggtgcaggtccagttggcctgattttatcagctcgactggcttcattcggtattacgagcatcgtgatggataaagcccctatctgcttcgaaaag

SEQ ID NO: 3944 - DNA, 773 bp, Photorhabdus luminescens
  misc_feature (570)..(570): n is a, c, g, or t
aagcttagtcgcggctgccggtagaatttgctgcggctggcaatgtcggtgaactaaacaaaaccacgctaacaaaagccgccggcaccgacgcaattaataattttagtctcaccttggacggtataaaaaaggtatttaaggcaggcgcggctagtgctaccgtcagcccagaaaaattggaagagctgcaaaaagcaactgatgatttaaaagaggtcgcaacagatacgctaattaccggggcatcgctaggtgcgacagtcggagccacactggataccgccgccgcggtcgtgccacacccggtagccaaagtggcactcaaaggtctgtcattggcatggaaagttaccggcattgttcacaccgcagaagaattaagcgagctcgcagaaaaacataaggatctggtttctaatgagctaggacaagaattaaaaagggaggtcaccgaggcaaaccaaattaggcggggaaccattctcgcaaaagttagagaacacggtttgataaaatagtctattaaatgcaatagtccttattcggcgaagcagataaggactattntgttttgaatcatatgtatcaatcacgaccagaattaacacaagattcttaacatactgatcatactaatgaagtctactttcaccctgctccggcaaatcatcttcattttgctcatcaggatcttcgaagtagtgccccaaccgcataactaatgccaattttttcagctagaatcaccaactgctaacctgggcataaaa

SEQ ID NO: 3945 - DNA, 666 bp, Photorhabdus luminescens
  misc_feature (39)..(39): n is a, c, g, or t
tagaggaagctgaaatccatgaaattctgggtagcttanagaaaaaagttgttcgtagccgcgtcttgcgtggtgaaccacgtattgatggtcgtgaaaaagatatggtgcgtgcattggatgtacgtactggtgttctgcctcgaactcatggctctgcgctgtttacccgtggtgaaactcaggctttggttactgcgactttgggtacagaacgtgatgcacagatcattgacgagttgatgggagagcgcacagatcgtttcctactgcactacaacttcccgccatattctgttggtgaaacaggtatgatgggttcaccaaaacgtcgtgaaatcggtcatggtcgtttggccaaacgtggtgtggcggcagttatgccaaaagctaacgaattgccatataccgttcgggtcgtttctgaaatcacggaatcaaacggctcgtgttcaatggcatttgattgtggtgcatctcttgcggtgatggatgcaggtgtgccgattaaagctgctgttgcttgtatttgcatgggattagcgaagaagacgatccttttgctgtgctgctgacatctgggtgatgaaatcatttgggaaacatggctttaaagtagcgggtacctgtgaatgataagcgccctggaaaggacataaaatggag

SEQ ID NO: 3946 - DNA, 757 bp, Photorhabdus luminescens
aagcttgatcaggtttagggtgatgctctaatggtgtacctcgaatcggcacaaacggtaccacaaatggatacacccccatttcagtcagtttggcgctcatctccacgatttccagttcggtatcgcccaaaccggccaaaatgtaggtactgacctgtcctcggccgaacaccgcaacggctgcctcaaacgccgcaaaatatttttccaacgagacttcggctttacccggcatcattttctgccgtacacgttcgcttaccgcctcaaggtgcatgccaatcgacaccgctcctgcatcttttaaacgttggaaccaggcaaaatcatcaggtggttcgcactgtacctgtattggcaaatcgacttgcgccttaatcgctttaactgagtcatataaaatcttggcaccacgatctcctgtgtttggcgtacctgtggtgatcaccatttgcttaacgccatccagctcaacggcggctttcgcgacctcagccaattgttccgggcgtttacggatcaaggttcgaccctcttttaaagactgatccatcgagccaaattggcaggccgttgctttggccttcataccaatgcaatgctgtaacaccgtcgtcgcccgcacatcacgggtactgtatgccgccactttgttgggaagcaatgccttccgcggttcttaatcataacaccggcgcatgcatgtgccgtaaagtcacccaggaattcgatcttaagacctcccttgtagatc

SEQ ID NO: 3947 - DNA, 766 bp, Photorhabdus luminescens
aagcttggattaaaaaaaatcctgtcatcaatgtggcactgaatcgcaatacaccgccttattcctttctggataaaaacggtcaaatcaccgggctggatgtggacattttacgcttgctgggagaaaaaagtggcatcatctttaattttatcccaacagatggtgcagtaggcattaaaaagcggttagaagatggcgaagcgcaaatgacctcgatgctcaacacgcccgaacgtaaccgttggctctctttcagtcatccctacggtaccgtggaatgggtgatgatcacgcgcaatgagcgtaatgcgccttatgagtttgaacaacttaaacaccatcgggtggcaattcagcgcggcaacgcacttttatcactcttaaaacagtatccagagatttttatcatcgaagttgacagcgtgacacaaggtattgatatggtactggccggagcggcagatgccacttttgacagcctgatcagtgctgattacctaccagccagccgctacggtgcccatatttctattcaattctttacaggctcatttgcaaccggaacaatacgccggcataccggcctatccctcactggtagacatattaaataaaagcacttgtgcactgccaccacatgaactgcgggtattactgttgaagtggtcatccatggcgaatgtcacgccttatgatgacaataaaacctctccttgggtgaagctgtggcgaggggcattatttcgcattgcattaagctcgg

SEQ ID NO: 3948 - DNA, 671 bp, Photorhabdus luminescens
  misc_feature (124)..(124): n is a, c, g, or t
cggataaggtgattttttgcgcagacgggttaaacttctctgttggctatgacaatagaaaccattttttaccgaggttagtcgataagggaaatgtgactcagagtttaaattctcttttggntcatcatatattggtagtggcggataaccatgccgccacaatttttcagaatagatttcaaccactcctgtttcggtatcaaaacctttaactgtgttcttaacaggatcgattcctgcgtatttcctatcatgctgaattaatggcattgaaatccctgctggcttttctcttaacgcctctacggttaagccaataggctcaagaatataattccatcccgcttcaacgcttccattaaaaaatagatcattcatgcctaagcgacaggccaagtcgaaaacaatttcgttatctgaccggctttctacccgaggcgaaatcattttgtgcctaaactgaacggattcttttgccttagctgaaatctccaatcctacacgtagcccttttctctcccaaggcttatccacggtcagaaaatgtcagcctaatggggaatgtggcgtgtgcaaagagatcaccttggacattgaaattgaaccttgcgtaacccgatcctatcccattctggcggtagcttgtaataacacatatgtttacacag

SEQ ID NO: 3949 - DNA, 755 bp, Photorhabdus luminescens
  misc_feature (4)..(5): n is a, c, g, or t
agcnnagcggattatctttttcaagttgtggccctaggccatagtttactgataatccgttattatcagctaataggcttttatccttgatttttacactgacaccatctttatccgcttgtaaaccgccgctaatgttaacctttactgctaatccactatcattattcagcactaagcctgaatttggattatcgatttgattgggtgctttaccaactgcctggcgaccgatatcagcaatattaatcaggtctgaataatcagtttgtagggggatactgccttctttaaagcgattttttaatgcatctactgaaggtcctattgattcacgattggcgtcttctatattggatagattatattctttctccatcgtaatcacctcgatataatattcgatcgatcttttgaaatatcatttatatactgccatactcccacatcggcatcacacaggatattttatctaaccatgacactggccgactatcttcgcggtgctatataattccagcgtatcactttccaatatgtatcacctgatcgcccttattaccctttgattgcttcgccccctgccttaccacttcccctcctctccccttaaccctgacctccatctctccaccctccccctatttccaacgcatccttctacccgcacggtgctactcctatgcccttcccaccccaatccccctatcccttccaccctttcaccctcccccattaccctttccctttttttc

SEQ ID NO: 3950 - DNA, 772 bp, Photorhabdus luminescens
aagcttgccccctctctgacactaggctgcggctcttggggaggaaattccatctctgaaaatgtagggcccaaacatctcatcaataccaaaaccgtggcgaaaagagcagaaaatatgctgtggcataaacttccgaaatccatttacttccgtcgcggctccctgcctgtggcattagaagaagttgcaaccgacggtgcaaaacgcgcttttatcgtaacagaccgtttcttatttaatcatggttatgctgatcaagtcactgatgtgctgaaatcccacgggatagaaacagaagttttctttgaagttgaagcagaccctaccctaagcactgttcgtaagggtgcggaacaaatgcactcattcaaaccggacatcattattgctctggggggagggtccccaatggatgcggtcaaaattatgtgggtgatgtatgaaccccctgaaacgcatttcgaagagctcgctctacggtttatgggtatccggcaacgcatctatagattcccccaaatcggcggcccaagccgaacacggttcgccttccccacatcctagcggtccaggttcctgaagtgaccctattttgcggttgatccctgatcactgcaccggttcgaactatccattgactgattcccatttgcccccactttcgtcctcgtcacgccgtgcatcacctggtctcccgactacctctggtacttctgggccctggatgcaattgctacccttccacatcttcgccttccccttattaatc

SEQ ID NO: 3951 - DNA, 748 bp, Photorhabdus luminescens
aagcttatgacatggctatgcagccgttgaagcgcctttctgtggtgccttacattgaacaatccacccgtctggaagcgctggagactatcacggttcaggatattgttacgtatcgtcatgagatgataaaaaatgctgctttgcaaatgatgatcattgggaatttgaccgaacagcagagcaaagtgattgctgaatctgcccataaccaactggcaaatcaaggaaatgattggtggagtggggataaggtggtgattgataaaaattacccggttaatttccagcgtgttggcagcagcacagatggtgctttagcagaggtttatattccgacgggttataaccgtatagaaggttatgtttattccagtttgttgagcaacatgctccagccgtggttctatgagcagttaagaacagtagagcaactggggtatgcagtgtttgctctcataccagtgtgggggaacagtgggggttgcgttttctactgcatacgtatagcacgcacccacatattcgaatcagcggcatcaagacttccactctaacgtgggtaataaattgaaagcctgcctcaagctgatttcagcagcccagagcgcgctgatcatgaacagccgaaccccatatacccgttatgcctaacttgcccgcctttcccgatcctaccttatacctcgctctttcatctcaccccctgctcgcatcctcctcacacttcccacttcccctttttttc

SEQ ID NO: 3952 - DNA, 680 bp, Photorhabdus luminescens
tgtcgacattcgccgcaaggtcggggtgattgatatcaaatatttcaggcgcggtggcaaacttaccgcccggctcgaactgaccaatgcgtacgcccttgccggtgtagtccttccagaccggcagaatgttggcatcgctcaaataccattgttgagcagctaatggatcgagcgggacttccggggtcaataatgtcgcaacggcgcgcatcggcgcggtttccccactgctgagatcgactaccgatgctgacggattcccggctgcgtcagttaccccatatttaaagctaatgacaccggtgtaatctgcatccggcgtaaacaagacatcgccctgagctgtgaggctgaccgtaccgcctatcgcatccccaacattggcaatgcgcagggtaccctgactgttaaggtgttgatcggtagccagcagactttctgcggcaatcaaatgaagggctgagtacgatcaaaaaccttggccgcctctgtcggagtgaggacctcctctacgggcatcggattgggtgttcgtaaatcaaccgcccgaatatcctgaaaaattggattttttggatattttttagccgaacccgggcccgtacgcccggcgaccttattcggcccccacattcccactggcggtaccgggaattttgataaccgcccgaggctca

SEQ ID NO: 3953 - DNA, 771 bp, Photorhabdus luminescens
aagctttactgggattggcacttcacattgatagtcacgtgatgtttaccaatccatgtaaatattattggggagatattcagaattatgcttttttggcaaaactgagtagccgtaaaccacgtcattataagagcgaacaggagctggaatattttaaagatcctgataatgctcaatcattgtttaacggtgacggtgaacaagatgtcagtaatcccttgttggcatcgtggggacggttgggccgtgataatctctatttattgtcgcagcttgagcagagttcggatattcacgcttttgttgaattagaacaggataatctattacatcaattgcaaagggatattctctatctggaagatcatgcccaaattggttcaacaaaagaaacatttgaaaacagtttgaaaaaaagagtacttgatccgttggatcgttctttatctttccatgtttgccatagccctcaacgcgaagtggaagttttacaggatcagctattgagattatcggaagataatccatcgctgacgccacgggatatcatcgtgatggccgcggatattgacagttatactccctatgttcaggcactatctggcactgtccctgttgaacgctatattgcatttgctatccgtgatgcccaagctcggtatgcaccttccactgtaccaggctccattccactggtcgattcacctaaaagccggtcaccagctagcacgttcaccatcgtccgtagtccccgtctcgataataaca

SEQ ID NO: 3954 - DNA, 675 bp, Photorhabdus luminescens
tacgataaccttctggcgctggcataccgaaattacggcgaattttttctttggtttcacggcctttttggtgaccaatcaccatcactggacgtccatcaatacgagccagaccacccacaattgctttgtcatcagcataagcacgatcaccagcaagctcttcaaaatcagtaaaaatatgctgaatatagtccaacgtataaggacgacgtgggtgacgagcaagctgagcaatttgccaggcacctaaatctgaaaagattttgcgagtcaattccagacttttttcccgcaaacgttgtacttcttcatccagatttatatctaatttttcaccttgacggctaactgcggttagcgaatcaattttcgcttccagctcggcaatcggctgttcaaattcaagaaaattcagactcataacattcctaattttagtcaaattctaattctacctgctcattacccagcagagttcgcaaatctgtcagaaggttatccgttggcgttaccctccacgtcgcgccaaatcttaaacgggcgcgggcgtcttacctctggtaataaagatgaaccggtatcgttcccgaacgatgtggttccattgcactacgaagacggctcaccaattgatcatcaatttgcctgtctgacagcgagatagcaagccct

SEQ ID NO: 3955 - DNA, 759 bp, Photorhabdus luminescens
aagcttggtttacccaagcacagggtgagttattgctgtttgatggaggtatttttgatgagcaacggtagtgataaagcgggttggttaacacctgtcacgcttgggcctgaatacgatgatgagctggagcacatactgagtcgttggctaggcggtgtttctggtttgcctgacgataaagtgcattctcaatggacatcagcacaactgccccagttaccggcagatgatgacgggtgtgattttgttatcacggattttatttcagatgcctcgccggcttttgagaaccagactgacgaaggaaccaagttatggcgtcatgaggaaattgtgtgcttgatctccttttatggcccgaacagccagcggtacggtgcctgttttcgtgatggcgtggcggtcagtcagaacaatgatgaattggaacgtttcggtctttcagtcgacaaactcagccggctgacttctttaccggaacttatcaataaccagagggggcgtcgttatgacatgacgatcaccctgcggcgaacagtggtgcgtgaatactgcggtaaatcactggtggaagcgcctgtgaaattcttacgacattaaactctgcacggtttacctcgttcaaccttatcatcgcacttccatatcggttctcatgcggctcatgcccgaactctggggcgttgctgtgctccgtgcaagcaccgcgatcaaccctgtgaacctcacccccgtattcgctatccctgttttttc

SEQ ID NO: 3956 - DNA, 672 bp, Photorhabdus luminescens
cccgcatggcactattggcggccaacttagcggcatatatttccgggtagcccccaccgagataaatcatctgacaatcgggtaaacggcgatcatgcagtggactaaaacggtgaatacggacccccacccgttccaacatctccagattatctgggtaataaaaattaaaggcttcatcatctgccaatgctagcgtcaagccatcagccaatgcgggatcaggcaatgatggtgcctcacccttgggtaaagtaggacaatcacaaagcgccaacagacgatcaagattgatatgcgcctccacctgctgagccaaccgttgccaacgagcatcattgtcagcctgctcttgagcaggaataaggccaagatgacgagacggtaatgacacatccttcatcacgggcaaacgccccagcaccggcacaccacaataatggttcaatcgcatgacgaataagttcgaaatgattttcagaattgacgcggttaacaatgacgcccgcaatcgttagagagggatcaaaacgaccaaaacccagaacagtggcggcaacagaggtcgatactgccttgcccgccaccaacacaatcaccgggcattccaactgcttagccattgcagcgctactgcaatagtttgggtttggaccctaaccatcatacaac

SEQ ID NO: 3957 - DNA, 756 bp, Photorhabdus luminescens
  misc_feature (22)..(22): n is a, c, g, or t
  misc_feature (563)..(563): n is a, c, g, or t
aagcttatgaagttgctttatntggcagatagggtatctatgaatgactatggctatcctatcactggcgatcgaatggtatctatgccgagagggccagttttatcgcaaaccttaaatttaattactggagattacgccagtgatgaatttgggtggggggcatggattaaaagtgaaaagaattatgaaatttcactcaaacggaaaggtataacaagggatgattttgaatctctttctgatgctgaattagaagttctggatgccatttgggaacaattcggtcatatgagccgctttgatattgtggagtatacccataaacattgtactgagtggcaagatccaggcggcagttcttatcctatttcaccaagttctgtttttattgctgtcggtaaatcaccagaagttgctgagaaattggcgcaagagttaatagaaaggcaacaactggactgttttcttcaaggattgcggtgatgccgggtgggattttaaggaaaggaagtttacttatcccatctggatatacagatcacttatatattatctgctgngatccagttttttaccctacaaaaaccaagacatgtcctttggctgtaacattagctctttaaactggcctaccgcatgatcgaacgtgatattgaatcgtggcgatcatccttctattagacatcccagttatgttctctacggtcgcgctgatttttttggttcatcatccgctgcacacctatggctgct

SEQ ID NO: 3958 - DNA, 657 bp, Photorhabdus luminescens
atttaccctcttatcttttattattgggttttatgagaaagataaatgtgacaatcaggccggtcaggtgccggccattggtttatttaacggttattcttacgctgtaatatctgtccagaaggaagtaatgaggagagatgttgctcggctaataatttcacagcagcatcaatatcaggtgcaaaaaaacgatcctgatcgtaataatctacttttgctcgcaagataacacgcgcttcttccaaaatcgggctgcttttcagaccattgcggaaatcgatcccctggcaggcagataaccattcaattgccagaatacctcgggtattttctgccatctcccataaacgacgtcccgcagccggtgccattgatacatgatcttcctgattggccgaagttggtaaactgtcaacactcgccgggtgtgccaatgctttattttcgctggcaagcgccgctgccgtcacttgtgcaatcataaaacctgaattcacaccaccattctcaaccagaaaaggcggaagctgtgacatatgtgaatccatcaacaacgcaatacgtcgttctgacattgcccctatctctgccaataccagagccaaattatcagacgccattgcatcaggttcagtatggaagtacccaccggat

SEQ ID NO: 3959 - DNA, 759 bp, Photorhabdus luminescens
  misc_feature (728)..(728): n is a, c, g, or t
aagcttttatcgaaagagattaaactgagttatcaatatcagtttccggttcatgtcatgggttataactggctccagtctaatgcggattccgcaaatcaactggctgagcatcttattgatattattacacactataaacagcgtggtcagccctgtgaaaaagtgattctggtgacacactcaatggggggactagtggcgcgtcactattcagagaaattggagggaagtaagaaaatattaggtattgtacacggtgtcatgccgacctatggcgcgccgacggcttataaacggatgaaagcgggtgaaggggggggagtcggactggttatcggcagtaatggcgccaagatgacgccagtgatggcgcaatcaccgggaccacttcaactattacctagtttgagatatggcactgggtggttgcagattaaagatggtaagacactttataccttacccaaacgcgatccttatgaagaaatctacttgcaacgtgataagtggtgggggttatgtgaagatcgtctaattaatccgaccaatgagaaaagaaatccggtagtaatgcaggcagattggaaaaaatatactcatatactgtctcgtgtagtccaaccctttatccgaaagttaactggtctgtaccacggcaatccctatgccttttatggtaacagtaccgaacaactctcttacggcgtcctgaggtggactcgtanaagtcatgttaccggcgagaagatcctattt

SEQ ID NO: 3960 - DNA, 665 bp, Photorhabdus luminescens
  misc_feature (15)..(15): n is a, c, g, or t
  misc_feature (427)..(427): n is a, c, g, or t
tcgccgccttgcggncatttctcccggtcaaaattaaacgccacccgatataagccgtctttgtcgatatcgccgtaggtatcattcactttggtactgctcacccgcgcgggtatcgtgccggccatcaccggtttcggcacccgctccgggcgaaagcacacggtctcggaatagggaatggcagtgaatgtcatctcaaaactgctgtcccggcgggcactgttggtgatgtgggtgatgatcgcccctttgcgaaacgtttccggggcgtcacctttcactttcaattcctgccccggcaccagcgtagcggaagtggtcattccccgcaggcgaatgcgttgattcaggtaacgttcgtgatgcaaacgggcataaaacaccccactttccgcctccggttgataggcgtaacgatcaccgngtattcggtagtcctcacggtaatggtacgcttcgccataagtcgttcgatcgccccgtgtcacatccgccttggtgttcaagcccggatacggacgggcatccggggagtcataattccgagtcgcaatttttcccctcaccacctgatacgcggtctacatgcccccacacaccgggtcctctttgccgtgcatacctgacggaatgcgggcaggcaagtacacattgaatctgta

SEQ ID NO: 3961 - DNA, 757 bp, Photorhabdus luminescens
aagcttatatgtaactttgatgtctgtatctatgctatctcacgcagctccagcaaataccatctctaatgcaaatgataagacgattaaacaagcagaagagaaaacaggagatactcttgttgtgattgctaacaacaatgcacaagatgatggaaaaattagcagcaatgaaataaaagtcagacagcctcaaagtgtcggtgaaatattaaaaaatgttccaggtgttcaagccggacatcctagcggattaggtcagcgctttaaaattcgtggtatggatgaccaattcataaacattactatcgacggtgcaagacaagagggatatcacttccaccacgcaggcaattacggaatagaccctgagttattaaaacaagttgatatcaacatcggtagcaacagtatcacatacgatacaggtgcaattggcggggcactaaaatttgagactatagacacggatgacttattaacccccggtcaattatttggagcaaaaagtaaactgagctattcaagtaatggttctgaattccaaaaatcactggccgcctatgggaaactaggtgctgttgatttattaggatatgttaaccatcgtaatatgcacgattctgaatccggcagagatggacgaggaagagactcaattcctacagatgggaaattactcaattatctattaaaaacaaaattcaatcttaccgatgaacagtatattagcttatcaaaagacattataaaaatg

SEQ ID NO: 3962 - DNA, 659 bp, Photorhabdus luminescens
tggaactgcctcgtgaactgtttgaagaacaagctaagcgtcgcgttgttgttggtttgttattaggcgaagttatcagtagtaatgagctgaaagctgatgaagaacgtgttaaagcattaattgaggaaatggcttctgcctatgaagctcctcaagaagtgatcgaattctatggtaaaaaccaagaattgatgaataatgttcgtaatgttgctttagaagaacaagctgttgaagttcttttgggtaaagcaaaagtttctgaaaaagaaacaactttcaatgagttaatgaatcagaatcaaatggcataagttttagttttgtcatgagataatgaatttatcatctcagtgaaatgaacccgcagattaacctgcgggtttttttataaattaagaggcaagatttttcttgaaaaaagtgggtttaccctcagatcctttttaatattatgtatatgattgccaaatttttcagggggaattcccccttgactggctaactttgaatcatggtcatcatcgcttatctcaagtagaattggttatgaatggcaccaacatgaattctattaggagacgaaaatgtcatatagcgacaagcgggatcaatatgcgcctcacatggctttggtgccgatggtagttgaacag

SEQ ID NO: 3963 - DNA, 766 bp, Photorhabdus luminescens
  misc_feature (618)..(618): n is a, c, g, or t
  misc_feature (761)..(761): n is a, c, g, or t
  misc_feature (766)..(766): n is a, c, g, or t
aagcttcgtagtgaagagacattttctggtgaaagttgttctgacaacggaacaccaaatcggtaattcacattgaatgaaaatataccatcactttttccctcttttcctaatttatagtcaatccctgctgtgatcagtggaattggggtataatttaccccaatagttgccgcatagggatctttttgtctcttgttctttccgaataatgcaacattatcaccaaaatattgttcatattttattttggcaccgagtgacggcattgaaggtaaatacatgtcggcaataaggtcataaccattggcagggcgctcataataattgactaaatcacgggcgttatgccaatcactcaggcgaaaataggcgttagcagacatctttaggtagttagtccatagttcaccacccaagctgaatcggctattattaccagttaaatcattatcgtaaaaagtgttcgccccatacatccagttatttatgaataaacgggtgccaatgcctaaattcacagtgtcacggctatctttatgacgatagccatattgactataaacaagccaatgatctttatcatcataaaaaggaacgagtaagtctacagaactntcatccagtcgcccacgatgatcaacattcaaattaattttagctgtaccaaactgtgataaccacttctgggtattacttggtatctgactgttcaatttattaacaatataatcctgtgcccaatttttcggatcctgatntatan

SEQ ID NO: 3964 - DNA, 802 bp, Photorhabdus luminescens
  misc_feature (587)..(587): n is a, c, g, or t
  misc_feature (762)..(762): n is a, c, g, or t
atctttaggtcattaagctaggctcgtggctggtatactgtgcgcaattgtgagcggataacaatttcacactggaaacagctatgaccatgattacgccaagctatttaggtgacactatagaatactcaagctttttctactagtaataatgctaatgtagtgagtcaagaaagatatgaagagagtagggatttactgagtgggtttccaccaaatgatgttcctacccatttgttaaataaagtattacgccaatcgtcaaccatagcttctgtcgtggctaattttattgcggcacaatctggtgatgatgttctggatgatggtgatatagctaaacttactgcgcaattaaatcgagcattagaacaaaaaatcacagcaaaaattcccagtgcctcattaacacaaaaaggtattgttcaactgaccaatgagatgggtaataatgacacactggctgtgacgcagaagctggttcaggaaataatcaattcgttgcgtgaaaatattaatgccaaagtacctaatagccggaaaataaacggtaaggcgttgactggggatatcaatctgactgcggnggatgtgggtgcggtactagctaatgatgcaatgtattcaatgaatattgatcgtttggatggtcgggaaaatctatacaatggttgtgctggatttaaaccgaatgcgccgttcctcactcgatatgggctgccatctgatcgttttggcgttcagctaagatttaccatatanatggtccatacagtgaaggaatagatcaagtatggagtct

SEQ ID NO: 3965 - DNA, 761 bp, Photorhabdus luminescens
  misc_feature (4)..(4): n is a, c, g, or t
  misc_feature (6)..(6): n is a, c, g, or t
  misc_feature (20)..(20): n is a, c, g, or t
  misc_feature (99)..(99): n is a, c, g, or t
  misc_feature (157)..(157): n is a, c, g, or t
  misc_feature (172)..(173): n is a, c, g, or t
  misc_feature (197)..(197): n is a, c, g, or t
  misc_feature (199)..(199): n is a, c, g, or t
  misc_feature (201)..(202): n is a, c, g, or t
  misc_feature (207)..(208): n is a, c, g, or t
  misc_feature (217)..(217): n is a, c, g, or t
  misc_feature (220)..(220): n is a, c, g, or t
  misc_feature (230)..(231): n is a, c, g, or t
  misc_feature (238)..(238): n is a, c, g, or t
  misc_feature (243)..(243): n is a, c, g, or t
  misc_feature (248)..(248): n is a, c, g, or t
  misc_feature (250)..(250): n is a, c, g, or t
  misc_feature (253)..(254): n is a, c, g, or t
  misc_feature (266)..(267): n is a, c, g, or t
  misc_feature (269)..(269): n is a, c, g, or t
  misc_feature (279)..(282): n is a, c, g, or t
  misc_feature (287)..(287): n is a, c, g, or t
  misc_feature (293)..(293): n is a, c, g, or t
  misc_feature (295)..(295): n is a, c, g, or t
  misc_feature (301)..(301): n is a, c, g, or t
  misc_feature (312)..(312): n is a, c, g, or t
  misc_feature (314)..(314): n is a, c, g, or t
  misc_feature (324)..(324): n is a, c, g, or t
  misc_feature (329)..(329): n is a, c, g, or t
  misc_feature (333)..(333): n is a, c, g, or t
  misc_feature (335)..(335): n is a, c, g, or t
  misc_feature (359)..(361): n is a, c, g, or t
  misc_feature (364)..(365): n is a, c, g, or t
  misc_feature (374)..(374): n is a, c, g, or t
  misc_feature (381)..(381): n is a, c, g, or t
  misc_feature (387)..(387): n is a, c, g, or t
  misc_feature (396)..(396): n is a, c, g, or t
  misc_feature (411)..(411): n is a, c, g, or t
  misc_feature (414)..(415): n is a, c, g, or t
  misc_feature (417)..(418): n is a, c, g, or t
  misc_feature (421)..(421): n is a, c, g, or t
  misc_feature (430)..(431): n is a, c, g, or t
  misc_feature (438)..(438): n is a, c, g, or t
  misc_feature (440)..(440): n is a, c, g, or t
  misc_feature (453)..(453): n is a, c, g, or t
  misc_feature (463)..(465): n is a, c, g, or t
  misc_feature (473)..(473): n is a, c, g, or t
  misc_feature (475)..(476): n is a, c, g, or t
  misc_feature (482)..(482): n is a, c, g, or t
  misc_feature (497)..(498): n is a, c, g, or t
  misc_feature (518)..(518): n is a, c, g, or t
  misc_feature (536)..(536): n is a, c, g, or t
  misc_feature (549)..(549): n is a, c, g, or t
  misc_feature (553)..(554): n is a, c, g, or t
  misc_feature (561)..(561): n is a, c, g, or t
  misc_feature (569)..(570): n is a, c, g, or t
  misc_feature (579)..(579): n is a, c, g, or t
  misc_feature (591)..(591): n is a, c, g, or t
  misc_feature (596)..(596): n is a, c, g, or t
  misc_feature (606)..(606): n is a, c, g, or t
  misc_feature (611)..(613): n is a, c, g, or t
  misc_feature (670)..(670): n is a, c, g, or t
  misc_feature (690)..(690): n is a, c, g, or t
  misc_feature (696)..(696): n is a, c, g, or t
  misc_feature (710)..(710): n is a, c, g, or t
  misc_feature (712)..(712): n is a, c, g, or t
  misc_feature (726)..(726): n is a, c, g, or t
aagntnggatacgtgaagtnaatttaccattagaaaacaatctattaccaaaaaacctaagtatttcggctgaaaaaattaatggcatcaaaaccgaantaccttatctattgagggaaatctatcctgttggaaatcaattacctaatgcatcggnaatcaataaaatggnnttagttattgaagaaataggtaanananngatgnnaaaatattnttngggtaatatnnaaaaaangatanaatananatnnatagagagtaanngngtaaatattnnnnttatngggatnanaataanaggtaatgatntntttattaatnaagtnattnangtattagatgaaataagtgaaatnnnttnnggaaatatngttattnaagagnttgaaaaanagggtttaaatatanaannannaangatggatgnnattgtangngagaaaaatggtnaattttatgnnnataatagngnnggtagnagtattggttttgannaagagaattatttgattggnaaagaagaaaaatttgtngaggagttttggngttnntgtgagnttggtatnngtttatatnatgagatgttanatatntattataatngttannnaaaatggtttatttttattgataataaaataattgataaaaaaggtagtggggggtnttttttgttggaagaataangattgngggaaaaaatatangnaatgataaaaaaangtatttgatttagtaatttggttattattagaaaa

SEQ ID NO: 3966 - DNA, 671 bp, Photorhabdus luminescens
  misc_feature (325)..(325): n is a, c, g, or t
  misc_feature (660)..(660): n is a, c, g, or t
  misc_feature (671)..(671): n is a, c, g, or t
ataggcatgaaaggtgtctaaatcatggcgtaatgtccccacgacgcgggagaccagatgcataacaaaagagtagcgatcaacttttgtcagatccgcgacatagcgactgcccggttcacaaatgcgggccaggtcattacgcgccaaatcaactaacattaagtgctcagctagctccttatgatctgttcgcatttccagttcggtccggctatcaagatccgcatccagctcgccggccgcattgcgcccacgggggcgggtgccggcgattgggtagatttcaatttggcgattggatgcatcatatttaagcgcgctntcaggagacgcgccaaacagacagaaatctttgtcctgcatgaaaaacatgtagggacttggattgtggtacttaagtttttgataagcatgaagtggtgccgggcagggtaaaaagaagcgtcttgatggcactacttgaaaaatatccccttggcggatgtattgttgcaactgtgccaccatttctgcatagctcttgtcatcccgattgtatgaaactttcatggctggcagagagatttgttgtactggctcaatgggctcggtaatgagtgccactaatgttttcaatcgttggttaaggcgttgctcttctgcttgagaatcactganaagagagattn

SEQ ID NO: 3967 - DNA, 835 bp, Photorhabdus luminescens
  misc_feature (17)..(17): n is a, c, g, or t
  misc_feature (24)..(24): n is a, c, g, or t
  misc_feature (28)..(28): n is a, c, g, or t
  misc_feature (33)..(33): n is a, c, g, or t
  misc_feature (44)..(44): n is a, c, g, or t
  misc_feature (50)..(50): n is a, c, g, or t
  misc_feature (52)..(52): n is a, c, g, or t
ctctgtggttttgaaanacatcanaganaaggnggctggcgccncaaagnanaaacctgtctgttgcaagcttgtttctgatgtcaatcttaatgcaaataaccgtggggaaaaaaaccaaaacggcgcagacattcctgataaaaatacgtttttgaagaatcttggcttaatagaaaccattattaatacccaatatcctgtaggaattgtgatttggttcgctcaaaataaaaaccccaatgtgctatttccgggtactacatgggaatatattggtgaaaataaaaccattcgattagctagcgccaatggctccgatattttatcaaccggtggcaatgatttgataagcctgacagcagcacaaatgccagcacataatcatacattttttgggacaacgagcacatttgattatggcaccaaaaccaccaatatcgccggagagcattatcatgatagtgggtggggtgaaactactggtgggcgttatggtcattttcgacggttctaagaaccatcagggatcaaaatctacagattggaacaatgcccaatttaacactagccctaatggtgcccactctcatcccggatcaatacgcagccatcaccctatcatttgcatgtaaccaccggagactttgggcggcatggcaccgcatccacttcgcctattgcattttcaacgttattgggatggcgatcccaaagctcacgaaccctcacttccccccggcccgtaacatatttcacggccatagccggactctggatcatactgtcgctcagagaacttcccactccgcctctccacatactcatattgttc

SEQ ID NO: 3968 - DNA, 663 bp, Photorhabdus luminescens
  misc_feature (67)..(67): n is a, c, g, or t
  misc_feature (138)..(138): n is a, c, g, or t
  misc_feature (196)..(196): n is a, c, g, or t
  misc_feature (306)..(306): n is a, c, g, or t
accttgaaccaattttctctgtgcttaaaagtagtgaataatggaaatatttgaggaggttaagtgntgcacaaaaatcatatcatgacgcgatcaatccttgatttcattagtcagcattaggggatctttgggttngatataaaagtaaagatgcattgtaaagcacctttaaatgacctattgtttgcttacntaaaagagtgaggtggtgtatggcatatcaaatcttaacaaatttagcggcaagtattaccgatttgaaacgtaacccaatggggacatatttgcagggggaaggtgaancggtctcaatcctgaatcggaatgaacctgcattttattgtgtgcctactgaattattcgcctactatcaggagctaccagaggatgccgcacttaacaaaatttgccgatgaacgtttagaaaatgctgaatttgttagcgcgaacctggagatctatagcctgcattttgaaagcgggccttaaagagtggaagaagtaggtcatccaattaaggatcacctaaagagaaaattgggctgaacgtttagaaaaccctaatgtgccgtcagcaagattaagtggcgatcgaacctatacagatttaattgcgggcttcttggcacccgtttggttatgaagtgaatgaaattagaa

SEQ ID NO: 3969 - DNA, 782 bp, Photorhabdus luminescens
aagcttctctgtagtgaaatagccattattccattaagagcaatgaatcacatttttttaacaagataaaaacaattcgtattctaaatatcaagtaaatcaatggcgatcaaaggatagagcgatgaacaagagaaaagttaattggcatggtgtttttccagcagtgacaacacaatttaactccgatttttccattaatttggatgccacacagaaggtaatgaccaacctgattaaagatggggtttccggtttagtcgtcaatggttctgtgggggaaaatacatctctgtctatgaaagagaagcgtactatcgttgaactcgcattagatgttgctggtggaaaagttcccgttctttcgggtatcgcagaattgacaacccataatgcgcgcaaaatggtctctgaatgccgtcaggcacgggctaatggagcgatgatcatgccgccactggtttatacccccacacccaacgaaaaccgagcgtatcttccgtacaataaccggcctctaccgatgtaccccgtcatgctatataacaaccctctgcctgcttaaaatgatattccccccaaattcccgacctctctggccgattgcgaatatatcctggcatctaacgatccatgaggcaatacccctcccttgtatcgctttccccactgaaacgtgggcacgcttcattctccttgctgctatgcatgccggcatttaaagttccccttcaatggcctcgtacggcttcactcctagtctcccttctccttttccttga

SEQ ID NO: 3970 - DNA, 674 bp, Photorhabdus luminescens
agataaacagcagattggctgaaaagaaaggtattaacaatggagattgggtagaggtcatcacccgcaacggcgaggcacgttttaaagcatcgttagatgataatattgcttacgacacgataattgctgagtttggttggtggcaagcgtgtcccgactatgggaaggaaggttttcccgccataggaaaaaacagcagtaactataatgcgcttatttctgacgactcttgtgatcctatcagcggcgcttctccgctccgttcattccgttgtgatattaaactcgcagaagatatcaaccccgagagaaggccgtggcagggccgtaaagcatttcgggttgtagatacaaaacccgaggctaagggtgtcaaaaccgttatttttgagtcacaagatgggacaatgctgcctgattatgaaccctgccaacatatcacagtacaagtttccctacctggacaggatgcccctgtcatcagggcctattctttgaccggaaccggcacacctggaaggctaaaaagagtcacagtattctccgtacgacattcgaaaagcataacttttgacggagaaacttttgaaggtgtcatggtttcatatattaacaagacactggtagcccgagcccaagcgatctgacccctccggaggaaactttatata

SEQ ID NO: 3971 - DNA, 773 bp, Photorhabdus luminescens
aagcttgatgcattaatccagcaaccgccggtgattgctgaaattgcttaagttgaggatcttgtaattggatagctttacgcacattttcataagcatcgtgataaggtattgtgccggaaggacggaaagtggataacattgccatcactttagtatcgttgtccagattaggctgattagctttaactccttccaacaaaatttcattagacagagaaagagtggaaagctcggtatccatattttgctgattgagcgtcattgattggaggtctgggcggcgttgatccagatgataaacggagtcactggcatgtaaattacgtgcttcacgatagagttcagttaaataagccgcgggggagaacatagaggaaaccgaacccggtgccacattttggctggctcggccaccaaattcattattatagccttgccattcagcatgagggagggtcattccgaggtgccccgcatttcgcaattgtcgggtagcgcgtttgagattactgcttcatatcatcgattctctttttgtccctgttgcgcctcacatttaagcgggtggtctctgaccatgcgagatgatcaaaaacttgctgacccgatttattaatcgaatcgtgacgaatatcggttaccctattaaccaccccttgactttgaaacacctgaggactctctctcacgcatgagcccatgcccattccttgcaatgcctaccgcaataatatctcccgtcctccttgtccactttctccaaatgatac

SEQ ID NO: 3972 - DNA, 669 bp, Photorhabdus luminescens
atatcaacgggcagtgggttgatgccgacaatcaagcaacttttaaggtgactaacccagcaaatggtgaagtgattgcccacgtcagtaatatgggtgcggccgaaacagaacgcgcaattgcagccgctcaacaagccctaccagcctggagaaccatgacagccaaacaacgcagccagattctgcaacgttggtttcagttaatgatggcaaatcaaccggcactggctgaattgttgagccgggagcaagggaagtcacagacagaagcgatgggcgaaatcgcttatggtgccagcttcatcgagtggtttgcggaagagggtaaacgcacctacggtgaaaccattccaagcccattgtctggtcgccggattgtcaccatcaaacaacctattggcgttgtggcggccatcacaccgtggaacttacccaatgccatgatcacccccaaggttggccctgctctggcagcatgctgcacggtgatccctaaaccccgctttggaaccccactttaccctctggctctggctgcctagcggaacaagccggaattaccgatggcgtattcaatgtggcgaccggcatcgaagcgaaagccatcggcggaactatgacccaaacaccgactgttcacaaactctctcttactggctaacccct

SEQ ID NO: 3973 - DNA, 761 bp, Photorhabdus luminescens
aagcttatcgctatattgaaaatattcgccgttatcagcttagtttagtcggatatttacaggccaaagaaaatcggaaaaaattaattccccaagaaaaccaaccaaaataaagtaaacaaatataaggctctaaggagtcaattacagccattatatatcctcagttatattatgtttgacaactaattcagctaaccatactaaattcatcgggacactatctctctcaaaggataaatcatgattaatttagacattaacgaacaaaacaaaattatggtcgtcagcagccatgtatttagaccgacgacggcgaatggtcgagcctttaccgagttaatagaagcattaaaaaagaacaatttcgctgttatcctggcggctacattccaagatggcatagctaccgtttcttctgattcctcactatgctgtatttttgttgattggacttcaggagataataactatgaatctcataaacaagtgttagaattactgaaagagatacgccaacacaatacaaccattccggtattgttgaccgccgaatattccagcatcgacacactgacactcgaagtcatgggattggcacatgaacctgtctggatgcttgaagacacggctggatttaccgtctttcccgccagtccgttattaagaacattatgcccactatcaccgcctcgactccggcttactgtatcccctaaaaatgatcagatattcctggactgccctggaactaaggcggc

SEQ ID NO: 3974 - DNA, 672 bp, Photorhabdus luminescens
cggtttttcacaagtacatttttattaggaatatctgcaacattttgtgattttttcaatgcgtaattggaaattttagttatgattttttgttctaactctctatttaattgaatgttgagtttaacgatatcactatcattgagaacactatcaccagattgtgtcatgataaaattatctacaacagagactgttgttgacgatcgacgtaataccttatttaataaatgcgtggggacattatctggtagaaatccagaatacaaactcaggattttttcgtatttttcttgatttactacattagcattattgctagtagataaatccttaaaataatttttgggactcatatactttcctcaaattagattatgtatttatagaccataccttgagttgttgtaaagatagtatccgttcatttataatttagttcagaaaaggaataatggaatgatttataacttaggttgttaactacttatattgtaggtggtagtaataaatagtcaatggtttataattgaaaatctacccaagctattaatgtctcatttctgaaaatatatacccaagaactccaagatggatcgcgatggcatgggagtgaattcacgggagcatagataactatgtgaccggtgtgagcgagtgcatgctacaaag

SEQ ID NO: 3975 - DNA, 774 bp, Photorhabdus luminescens
  misc_feature (419)..(419): n is a, c, g, or t
aagcttattaacagtctaaaatggcctgtttttataggccatttagattgttgtcatgactatctaaaaattaaattctgtcttttcttttagtcagtaataaattagccaacaaccaaattattttatttttagacttaattattttcagcctaaataaaaacttatttctcttccgaataaattcagcatcttgtctttgataagaaaaatcggataaaaaagaagaaagctcatcaaatcttttggatgctagcattttccacattagctggccttttaggcttaaagcttttgatttaacttttctcataaaggtttcacgatcttcgttatggtattgcgtgtccatatcttgataaatcttgtcccaagcttggatttcatctatataattctttacatcccacctcttattnatgatggaatcacttcggtaaatataattataaagatattctgggatgtaagaaaacttcgctttacagatacttaacaaaataaatgaaatatctctctctacaatcaggttttgatcaaaccaactcgcattttcgtacaagaactaccgtgcattaacatacaacaaatgccaaaataatgcacaattcacaaaacttgcatgcccagattatggaactcgtggatactcgttcacaacacaacgtctgtggcctgtgtgaacatcggttgaacaaacacatagcgatatggactctttgcgctatcatttgtgttcccccttgatccataacccgaggctcataagagtca

SEQ ID NO: 3976 - DNA, 664 bp, Photorhabdus luminescens
  misc_feature (664)..(664): n is a, c, g, or t
gaaaaagtaaagaggaataacattattaaatccggaattggtaagttctttgtataatctgctttcaggtggacaagcaatcagcagctttcctttattataatcaaaatatttaactatattcatgatatatgtggtatgaccgccgccattccctgtatggaaatttgttatcataatattcattgctcacctactcttatctttgtcatgagttaattttatctagaaatcaaaaccaacatagatcttatttatatttctcataatataaaaattcattcaggaattttatcttccggtaatgagctatatttcatgaccttattactaaagttcagaacatcatcttgattttcacatatttcattagacaacattttacaattctcaggtattgtagactctgtaatacctgtccaatctgaaaatagtgttaagaaattcattgaattgcgttgaacattaataatattacgtgacgtatcatcgtaagatgtaatatacataggaacctgataatcttgcttatatttatcattatgagcaagcctcatcttcttactatctttctcaaagaaagaaactccgtgatcagcaaaatacatcaaagaccaattcttctcatttctctgtgccttataataattattgataaccagcn

SEQ ID NO: 3977 - DNA, 837 bp, Photorhabdus luminescens
  misc_feature (381)..(382): n is a, c, g, or t
  misc_feature (398)..(398): n is a, c, g, or t
aagcttattcaacttcgtcacgtgtgactatgacggaaattcttgatcgtcacccatccccggtcgtgatcgcatttagtacgaattaataattactgaaagtttttctcttgttataaataagattccaaaatagcgccacatcttacatcactcattatttcgcctatacaataggttattaatttcgggcgtgcaaaaatatggaacgttttttttttaatatggtggggagaggtatctccattttgcattggggggatctttcgcggtaaattggagaaaaaacggggggggccacccccgtgttgtcgaaactcttctctcgggaataatttggttgttcaaccaataaaaacccccccccccccctggcaggcnncccaattccccccaancccctccctacggttttaaatcttttttttcctcatctcgtaccaaaaatacaaattcccttctcccatatcctcttctaaaaaatcctttgggttttttggcttcattttctcccacccatacctaataccccccgcaggggggcggatatcctccttcttttcctccccaaccaccgggcacctctttatcccatgcctcgcccctcatcctcccggtgttccacgcggtacccctcgccctttcccgcatccccaaaccatccaccctttatctcctttgcttgcgattgttgtttcttattaccgtttttaccctgttcactcttatctcacccccgctttcttctttggcctgagcttcttcaccccaccccaaccctcatcgcccccctgtcactttttctcctaccttcttatcactttcctctttttttcg

SEQ ID NO: 3978 - DNA, 662 bp, Photorhabdus luminescens
  misc_feature (510)..(510): n is a, c, g, or t
taccgccgatggcaccaccaataccggcagattctaccgcctctttggctatcagtgcacctttttcccaagctggcaacgagttatacaacagccctaaatcgttctggttttctgtcgtcacaaactgactgatacgatgggaatcttcttctgataagccaaacatccatctcagaccactgatggcatccgctgtttttattcctccttccatttcagcctgataggtcagtgtgcataacccaccgttcccggcacagtgagacaacatttctgcccgttgtgtagcgctcagtttgttgtatttgttccagattgcttcggtaggcgttccttgcttattggcttcctggagttctctgaccagattgtaggcattcatggagttcaggtggttaaagagaataacaatttccccggcattagctccactgttagcccctttggcgctgttggtcgcaatggcccctgcgacgctgccaatgattttgccacctgcctgaattntcattggatcattgaatgtcctatccaatgttatcgcggccagctctgcggctaatgctccagccgccgcccctttgcatcaccgccgccattttcgcacaagagcagaaccgcccgatggctgatagctttacgggtaaattaacacccga

SEQ ID NO: 3979 - DNA, 655 bp, Photorhabdus luminescens
catcatcaggaggcgaaccgggcagcagcggggccagtgggatcggatttttatagtgttgggaactgggctgataaagttttcgccatgcttcatcatactgcttttgctcttctgtgcggttatcgtcgacacgcatcaccccgaagcgagagcgggtcgcaatccggatataatctttttcttgatcctcactaagcttatcccccggaaatttcacctcaatcaacatttttaggttatcggggtgtacggagccatcaaagtaagtagcatttctacctggccaacggagaacttcgtctttaaccaaaataatatcgggccgacggatacgtttaacaccaaatttttctacatcgtcggcagaaggccgggcaaatgggttactggattgcggtaagttatcactataacgctgtttagaggccagactggtcgccagcatgggcagaggtacatctttaggccctcggatagcaaacaccacttctgctttatagggccacaggaagtcatgcttaagctcctcaaccttaatcaacccactcataatgacttgattaagatagcgaatagcgcccagtttggtgataatcattgccggcaggcccagagcgtattctgcttttctcgccagataacagggatcttc

SEQ ID NO: 3980 - DNA, 755 bp, Photorhabdus luminescens
tgatgtgttagggaagaaagcggctcgggttggggatgctgtatcctgtccaaaatatggtggtaatcaaaccattgtggaagggacgcctagaataatcagctctaatggacaaatatgcactggagggaatgaaaacctcttgtggcgcgacattgattgcttcgcaaaacctatttcaagcataggatggcggtaaaaggccatatctgcctgaaatagggttagttgattcaagtacgggtgctccgtgcttcattatctttttacaaactacccggttgacgtggtggattacggcctgatctatttgttgtcgcactgcgaatatcccgaccaataacatcgatactcgcttgaaatggtgggaatggcagagtaatgccgtgttcgcggaatccttgcaaaataagctggtggacttcgtgacgaacaggcatgcgatgccccatttccgcggcataaatacgtaattcaaatatctgaataccatgttgaagatcaaccagataggcttcaggtgccgggttatcaaggatcagagtgctgcgtttagccgcggctaacaggatttgggtaacctcttcacagctagcttctgccggtgcagggattgtcagtacaacacgagcgatggtgccagataatgaccagctaataaactgttcggtataaaggctttgttaggaacaatgatccttttactgtcccatacgaccgggccgcagcctccgtatgatcttcccatgctacca

SEQ ID NO: 3981 - DNA, 668 bp, Photorhabdus luminescens
cacgtactcagggggagattaaaatattcaggctatcctgcaacaggatagccctttgattatttatctgcgcttttcttagcccgtttggctttgaatttagcgacaattttctgagttttggtagaaagcgtcttaccctttttcttatcccctttaggcttatccgcagatcgctctttacgaacagcaccatcaggctcaaaatgagcttctttgcgataaccacgcccttttttcttactgctttcgcggccaagttctacttttctctctctatcgcgcactgttttacctacattccgggctttgcgggcggtagaaagcagcttaaagtcaatattacgctcatccatatgaaccgcttccacacgaatttcaacttcatcccctaaccggaaagttttacccgagtattcacccactaaacgctgaccgatattatcgaaatgataataatcattactcaacgtggaaacatgtaccagaccgtcaataaacagctcattcaagcgaacaaagaaaccaaaacctgtcacactcgtgatgatcccagtaaaagtattgcccacttgatcctgcataacatcacacttaagccaatcagcaccgtctctcgtcgcttcttttgcgcggccctctgtcatggagccgtgctgcccagttgc

SEQ ID NO: 3982 - DNA, 766 bp, Photorhabdus luminescens
  misc_feature (559)..(559): n is a, c, g, or t
  misc_feature (647)..(647): n is a, c, g, or t
  misc_feature (766)..(766): n is a, c, g, or t
aagcttcgcggcacagaaaagcggtttaatcgcaggacagggaatcgattttgtccagaaatttacctccgcgatcctcctatggtggggggtgaccgaagtcttacgcggtgaactgactccggggcaacttatcgccttcaatatgctggccggacacgtcacgcaacctatcctccggctggcacaggtttggcaggattttcagcatacgttaatcgcgttgaaacgtgtgggggatattcttgatgagccaatggaaaacagtaaacagggattggcttctgtacctgagctggaaggccaaattgaattcaaaaatattcgcttccgctaccatgacgatacaccggaagttctggcgaacctgtcgttattgataaaatcgggtcaatttattggtataactggaccgtccggttcaggtaaaagtactctcacccgtttgctacaaaggttatacgtacctcaacatggacaagttttgattgatggcatggatttagctattgctgatcccgtctctttacgccgcaatatgagtgttgtgctccagganagtatcctgttttctggcagcatcaccgattacattcggctgtgtaagctcaacgcaacagatgcagaagtctatcgtgccgctgagntagcctgggccattgatttattcaatcccttcctcaccggtttgccatccagttggggagaaaggagtcatctttcaggtggtcaagacagagaatcgcataagcagagcgctttggtn

SEQ ID NO: 3983 - DNA, 660 bp, Photorhabdus luminescens
aagcttggtatagtttacgaaggaaccgttgaagctaaggcaggttttctaacgggtggaatggtttccagttatatccgtgttcctggaattcaccagggattattacgagacaaaaaatcctggatatacaatattatttcacctagggaaaatatgttatttatctgcctggacggtaaagatgattttttatttgtgactcagagtaaggatgggaaagttatcgatgatttggaagtcgttcgcatagcgcaggcaggaataggttcagatgctgaggtattagtccttggcaatacgatatggaaaggcggtgttgctctcgttgctgataaatattctgagggtagggtatatttagcaggagattctattcacttatttgctcccaccggtggttttggtatgcatacagggatcgacgatgctagcaatttagcttggaaaattgttgcgtctataaatggctgggcaggtaatgcgttaatggattcttatgaaagcgagcgtcgtcccattgcatggagaaatactgccgctgcactttcttatacacggcagacagcatcactatatgtgcctgcaatttagaggatgcggattatgcgggtgatctggcgcgtgaaaaattaatattgagttagtcattttctctgt

SEQ ID NO: 3984 - DNA, 758 bp, Photorhabdus luminescens
  misc_feature (545)..(545): n is a, c, g, or t
  misc_feature (610)..(610): n is a, c, g, or t
  misc_feature (666)..(666): n is a, c, g, or t
catcaacttttttgatgaaattatccgtcagcttttgaatatcatcctgcgcacgacgctcatcatcttcactgatctctttgtctttcagcagtgctttgattttgtcgttagcgtcacgacgaatattacgtacagagacacgcccctgctcagcttcgctacgaaccaccttaatcagatctttacgacgctcttctgtcaatggtggtaaaggaacacgaattgttgtccccgcagaagatggattcagccctaaatcagaagccatgattgccttttcaatcgccggcgtcatagtacgatcaaataccgtgatagccaaggtacgtgcatcctcagcgatgacgttagcaagctgacgcaaaggcgttggtgcaccataatactcaacaatgataccatccagcagactaggagaagctcggccagtacgaaccttgctgatttggtttttaagtgcttcgacgctcttttccatacggtcttgtgcgtcttttttgatttcattaatcacgttacaaacccttgggaactggttgttntaaagccataagctattatgaccatgtttgttaaatttggcgtatcaggcgactcatcataccgncaaacatctctggtgtctttgaacattactcgtgaaaaatcagggtgccttcattntctcccattaccacacgacgcaacgctcccggcttattcatgttaaatacgcgaatgggtaagctgtgatcacgagccaacgtgaatgccgc

SEQ ID NO: 3985 - DNA, 668 bp, Photorhabdus luminescens
  misc_feature (489)..(489): n is a, c, g, or t
caatggtggatttacccatgatggctaggttgattgatgcattgccaccgaaagcgaaaattgttctgcttggtgaccgagatcaattggcatcagtggaagcaggcgcggtgttgggtgatatttgccgttttgccgaactcggatatagcgtaacgagggcgcaacagctaagcagattgacgggatgccggttagttgcgggtgatcagcaaaatatcccagaggttcgtgatcgtttgtgtcttttacgtaaaagttatcgttttaatgtggattcggggattggtcaattggcgacggccgttaatcagggaaagagtcgacaagctctcgctattttgcagcaaccgttgaaggatatctgtttttacccattgtctgacgatgaagattatcagcggttgttggcagaaacggtatcgggttattacctttacttgcatctggtggcaaacaggcaccagtcaaagagattttagatgaatntaaccgctatcgtttgttgtgtgcacttaaagaaaggctgtttggtgtcagtgggcttaatgagcgtatagaacagctattacatcgtcaggggcttattcgtcgtccagtcgggactttcagccgtggttatgcagggcggcccatcatgatatcgcgtaacgacagcacattgggcc

SEQ ID NO: 3986 - DNA, 775 bp, Photorhabdus luminescens
aagcttctggatttacccgtatgcagattgctggctcagtgatgaaaacggctattccgttggtgatcctgactatggttatcggagagtgggtcgcgccacaaggtgaacagatggcgcgtaattaccgggctcagaagatgcttggtggttctctggtttcaacaaataaaggtatgtggacgatagatggggacgattttatctacatccagcggattgtgagtgataccgagattaaaggcgtcaatatctatcattttaatgatgataaaaaactactctctgtaaaatatgcagccagtgcggtttatgataaggataacgacctatggaagctttctcaggtggaagaatctgatctgacagacagcaaaaaaatcaccggatcacaacgtatttctgctgactggaaaattctcctgacgccagaacagttgaatgtagtcgcacttgagcctgaagcgctttccatcagtggcttatatcagtacatcaaataccttaagcagagtgaacaggaatcaggccgttatcaactgaatatgtggaaaaaaatatttgcgccgctttcagttgcagtgatgatgttgatggcactctcttttatcttcggaccactgcgcagtgtgccgatgggagtgaggatagtaacagggattagctttggcttcctattttatgtacttaatgagatctttggtccactgagcttggtgtacagcgtgccagcgggtttggcggcactattaccaagcctattgttccttactga

SEQ ID NO: 3987 - DNA, 668 bp, Photorhabdus luminescens
ttaaatgcataattacggagttaagtgaccagccagcgctgataaaaaattgcgcccttgaccactcgtctgaatacctgcgtgaagccctctcagtgtggttagccgccggtgtagaaattaaatattcagcgcaggacagagatattttaacagccatcggattccggcctcacatggcttcgctggcagataatcaggaaaaatatacacccgtgcagaacctgatttatgcactccgtaaggctgaactggtcaggcaggagcctgtgtaaaatccccgaaaatcccgctatttttcctaaaaaaccatgcatgcataaggtgcatggctttacatgcgttttccttccttgcaatcccctgcccgcgccagtcccagcacagcctgagcacatccatgcaacaaaaccaccccagcgcgtcgtaatggcgctgttgtgtttcgtatatgctgacatgtgtgtcgtgtagtgatgatgcgtatgcggagcgcccgtctgagatgccttgctgcaagatgagaaacaccgcccaatcgcggtgcttaacgacttatttagagttaccggggctatatacccgtgctcattgaaactgcttgattttcgcccaatgaggttcatggtatcagtcatgaaatattcattaccgatgaacagaagctg

SEQ ID NO: 3988 - DNA, 777 bp, Photorhabdus luminescens
atacagtcgagatatcgacgaagccgctcgtgcctctgtacctcaactacaaactatcctgagacaactcccgcctcaagactatttccagaccatcatcgaaattgatactgctctggaaaattcagaattggatgacgagacacgaaataccctgttggaagcacgtttagagcaagtacgcaatctgaacaaagatgttaaaaatgtcatttccagcttacatgaagaaagcaacataatgaccagcaaaattgccgatgttcgtaatgtcgttattttagaacgtctggaagagcgtctgaaagaagagcaggaaagaaaagaagaactgcaagctgatatcacgaagaaagggcaggataaggccaaattaatcccagatcgcgacaagctcatcgaaagtcaaaacattatccgtcaatataatctggccgatatgtctaaggactatattccccatgcccgtgaactggacaaattgaatctggctagccctaaaaaagaacttattaaacaggcgatcaaacaaggaattgaatcacccaacagactctgagcaatatcttcccaggactaacatatgctgagctagctgatgccaggatcaaattagatcaaccaaccgctcaattacctaaagacggcgacgacttacaaacccattaaaaggcgcagaacaaccgattgcccatatagaagatgcgcataaaatccgacaagaaacgaccactctattactgccggccacttaacctggagcatgtatggagccta

SEQ ID NO: 3989 - DNA, 787 bp, Photorhabdus luminescens
  misc_feature (767)..(767): n is a, c, g, or t
aagcttaaggcattattctccaccgcattcttcccggcttgggccccggtaacggcgctttcggtggagtcaccggcaatgccgccggccagcccggccgccaaagtagaaagagtgctgatggtctgtttttcctcttcacttaagtcgctgactttagcattttcgccgtgaatatgcttcatcagttcccgggcagccagttcaccgcccgccgcgcctgccgcacccgccagcgcattgttgccactgacttcggcggctactgcccccagaatggcatgggccagagtattggtgacgatatcgacttcatgggttttcgggtcggtagtcaggtctttaatcaccccggccagataaggagaagcgccgcctgccagtgcctgaccgatatttccgcccgcgagtccctgaatggccgcggtagccgcctgtaaagcagtgtggtatttcccaccggtgcccagaccagactcattcaatgccgcgttataggcggtcttgtaatctggtcttaataagcgccgggtgatgtccgttttaccgttatcctttcgtacttttatggcccgttctctatccgggtcactgatgttcttcagtttggcgttggctgctttggtggcgataatggccccttccgtgctggcgatatcaatcacctggcgcactgatttcgccaatcagttgggcctgtttcagccgttgctgctctttctctttgcaaagattgggctgagggcattgttgcatggtcggatccnggtcaggcgggtacattctg

SEQ ID NO: 3990 - DNA, 689 bp, Photorhabdus luminescens
  misc_feature (617)..(617): n is a, c, g, or t
gaagagataacgatgatcaaagctaaattaaaattccgactgcataaaacagctattatcttgatttgcattgctttattagtatttctaatgcagggcgtttcttatttcagccgttctcaccaacaagcccagatggatcaatttgaggaattggcaaaaaccttggcaaaacaagtcgcattcagcttatctgattatatggagagtggcagcaaagatcttaataatgagcggatactggctaatttgcatcatctgacgacaaacagccgcatacttgatgccagtgtttatcttaacaatgggacacaggttgcccatagcggagaaaacgtctcggtgcgggatcgtctatctttggatggtaaaaaagcgggcagctattttaactaccagatagtcgtccccatcccaggaaaagatgagccaaaaggctttctgcgcctgacgctggatccccacaattggcaactgagtcccagcaggtggataacacaactaacttactccggatcatgatcttactcgctttagccattgggtttattctggcacataacctattgcaattaacaccaagtcgatggcaacaatcgcgcttatttactgacagncaacagtaaattaagtgcacatggataagaagagcaataaggcgaaaatttcttactaaatcattttgatat

SEQ ID NO: 3991 - DNA, 772 bp, Photorhabdus luminescens
  misc_feature (39)..(39): n is a, c, g, or t
aagctttctggcctttccacggcaaaaagacacggcggngcaaatccctggcaacttcacgcccgtgaccaaaaggcgcaatcatttcaggaaaaaagatatgtggacctgagcgccagtctgtgtggataagctctctttctcccgaaagaagctcatctcgattctgctcagataaaaaagcccaattacaaaaggcgattgggtgcccttgtccatctgcatagtagcaaaactgattcagttcaaatgcaggcaagatacgctgttgccactcggacaccaggtatcttcgatgcagaggagaatactggctcagcagcatcactcctccaatcattgcctgaatttctgcggtattcagtttcgctggttgatgtataatcgccatgcgctaatcaaccatgagattctattttgtatttttagataggcgtttttcagcgttagccggctcttccactatagattccgatgcaatccgctctttagcccctcgcggcgcgggtaaaaccctgctgcaactatctatcaacattcggcgcccttcgtggatccttccactatttttaccctacaacacactatcctaaatcctgatgctggcatatgcataactcgcttcaatcgcaagtgcttatcattccctgcattacggcctcgcccatccattaggtccttgcccacccatagaagagaaacacctccttattatactgagcctccagatgggtggcaccacatcctcaacatcccttacccgcaaaaataa

SEQ ID NO: 3992 - DNA, 680 bp, Photorhabdus luminescens
  misc_feature (226)..(226): n is a, c, g, or t
  misc_feature (324)..(324): n is a, c, g, or t
atcaataacaaactgttggagttctttaccttgcaaaaggctcatccttattttttatcacaattgattaaatagtgcggaataatagcatgtcaggtcacttaagggtaagtcaactaagcgactaatcgaggcagattccgctattggcgatataacccctgtgaatctatatacttttgtactgaaagggggagtaaatcgtcacaacttaacccttgctggnggcgttgacggatgtcggttgctgagatcgacagcagaggtgtatctgccagatagatataaccgttaggtttactgccaagttggcttggatcgtanatttgatgttttgtaagccattgttgcatttcagttgtggaaaactgagtttgataaccaggacgagcacaaactagcaaatggcagaaactcagtagctcttgccaacgatgccaagtgtgcagtgataacaaagcatcctgaccgattataaatgctagtggttgattgataccaagttcctgacggaatgactctagcgtattaattgcgttagacgggaatagccctctccatttcacccttatttacggtgacaatgggctatgctgccctgggcagtgttccattttaaacccattgtttatcataggcttacagatccggtcggtttgtggctctctatttgtaagaat

SEQ ID NO: 3993 - DNA, 756 bp, Photorhabdus luminescens
  misc_feature (360)..(360): n is a, c, g, or t
aagcttgtgcccgaagatgaatctattggtaaagccgagttaccagcactcgaaattaaacaatataaacaacaattcactgatgatgagctgtgtagtctttgctggttatggcgagatgctgtcgagatgattagttcaatatctgatgtttatcccattctgagagctgcggaacataggcttgaaggtaaatattattcaatgtcacatgaatatccacgaaacatgaacatagtccggcgagtattaaacagcttaagatttggaaatctaccgttctaaccctaagccagggatggattacattctgaacttgcttagtcaatattaaacgtattacactcatttctatacggnctgtatagatctagttgcccgatacagaggagaagagaaatgagattacgttgcatggcttatcgtcaagatgggatgtatgtagctgcctgtttggatctttctttggctgtacagggtgacaatatagatgaagcagtaaataaacctcaagcccagattgaagattacctcagtgaggtgacatcagaacctcattacgaacaacagatgttaagccgaaaagcacccgttttctatgccggttaaatattggccaattgcctttcgatttccatgatcacaaacacactggcctagctaacgttttaatgaacagtgtgacccccttgatgtaaggtggcgtaccgcttttatgaaattacccctgcgaatactcgcattctcaatggctca

SEQ ID NO: 3994 - DNA, 669 bp, Photorhabdus luminescens
cctgagcttgctggaattttttcaatcgaaactaacaaactctttggcgaattactcacggagaacgatgaagccgcagagctcgttaattctcttttgtatgaactaagcttaatgaaagtaaaaatggaggatatatgagcacagcagtacaaaaagtttatgaaatcatcaacccgctcaagactgaatttgagcaaatttgtagtgagccgggcatagtatttaaacgtgagtctgaatttgctatgcagatattcgcaaataatgattttttagccacaactgcattaaataatccggtttcagcgcgtagcgcagtaatgaacattgcagcaattggcattagtctaaaccctgcgcaaaagctggcttatctagtgccacgaaacaaaagcgtgtgtcttgatatcagttacatgggtttgatgcacatcgctcaacaatcgggtgctattaagtggtgtcaatccgctgttgttcgaaaaaatgacatattccagcgcacatctattgatactgcgccaattcacgaataccacgaattcgatcccagcgcaatcgaggggggacattgttcgcgcgtatacagtaatcacaacggatgactgtgattacattactcacacaatgagagcatgagctatatttgatatcagagatagatca

SEQ ID NO: 3995 - DNA, 768 bp, Photorhabdus luminescens
  misc_feature (382)..(382): n is a, c, g, or t
aagcttatgcttcagcgtttattggcccggcggatcaagaggttatcactcaacaacagaaagcgttattgcagcaggctcaacagcagcgggaggcgttacgtaacaacatcactttgtctccagctttagagcacgaaactgatggtgctaaatctgtttgtcataccatccgctatattcaatttgaaggtgttgagagcctttcccaatcagtaagggaaaagttaatacagtcttatttatcccgttgcttaaccttgccagatattaatgaactggtgcgtaaagtatcgaatgcctatatcgagcgaggttatgtcacttctcgggctggactcagagcacaggatttatccaccggtacgctcattattaccgngagtgagggcaaagttgaatcaatcactcttgatggtgagacatccctttcattgaaaatggcctttcccggaatggttggtaagacattgaatctacgggatattgaacaggggatggaacaactgaaccggcttccttcccaacagataaccattgatattcagtcgggaaaacagccccgttattctgcggttatcttaaaacgaatatcgactcgtttgccgggtggtgccagtttggggatagatatactggtcaaaccgtattggcaccgcgcaattaacccccgcgcaatgtagataccctattacatcttgcagaccatgggtatattctgcactcgaacacctattttgtaataaccaccgacggcactttttttac

SEQ ID NO: 3996 - DNA, 768 bp, Photorhabdus luminescens
aagcttattcaatcaccaaattgtgacgctgactgtacaaaattaacagaatatagccttaaccagattagcccagtaattgataattacgatacattgcagaaaagcaataatatcccacgggcagtaattgcaacaatttctctagccttaccgacattagctaaaacggctacacctgctgttactaattggattggaagtacgactattgcaaacagagctataggtgtaggtactacaggcttagccaacctaggaatgcaaggttacaacatctacaacaatcctcaagaaaactttagctataccagtttcgggacatctttgattacaggcggtgcaacggcaggaatggggtattggggtactgctgcgactaatacattaggagcaggtgtttctagcgtaattgatggaaattctccgtggttaccaatgggaggcgcgtttgtaggatcatcagtaggttatggagtgacaaagggaactactaactatttggataataaaatgaatccttggcccaatggatccaaagaaagactcaatctaatcaatccttcgatatctgcaccaccgttagtatcccctgctcctggcattgttggtagtgcagcaggagctgttggttctgcaactgccaacaaagcaatcatggatgacttaagctctaacgatcaaaaatgaaatgcataatctatttcttatattgcccctctagttaagagcataggtgcgtccatcaccgcgatcccggtaaacctg

SEQ ID NO: 3997 - DNA, 767 bp, Photorhabdus luminescens
  misc_feature (537)..(537): n is a, c, g, or t
aagctttaatgcttgcctcgatatctttcctgacgacgagacgattgaactggcggaacaagagcgattggcagaggatttgcgtttactctatgtcgcattgacgcgttctgtttaccattgcagtgtcggcgtggctccgctgataaaaggcaataagaaaaaggccggggatactgatctgcatcaatgtgctctgggctacctgttgcaaaagggggtgaaaggggatgctgattttctggcaacatcgcttaaagaattaagcggagatggcattgttatatcatcaattaatgagactgatgatcacccttggcaatcgcaaagtaaaaatgatttagtcctgtcggccaggcaatttaaacgtagagttcaggatgattggcgtattaccagttattctggtttacgaaactctgtagttcatcgtggtaatgcttccgcttattttgctggagaagaatctattgacgtgattgttcagtctattgcgccaaaacttgatgttgatgctagtggtgaaagacagttagnagaacaacctgaaatgacaccacatacatctcccacggcggagcttccgcggggacttttttacacgctattttggaagaacttagtttcagccaattacctgatgagaaatggttggcagaacaactgccatcagccggatttgatgaacgctggagtgggacattacagcactggatggtcgatatctttactattcatcgaacgatgaaggagtcgcattggcacac

SEQ ID NO: 3998 - DNA, 661 bp, Photorhabdus luminescens
cgtcgtggcgttcgtcgcagccatttattaagttatcaggcagatggttctctacttcaagaattattctcccgagatggtattggcactcaaatagtgatggaaagtgcggaacaaatacgccgagctaatatcaatgatattggtggtattctcgaacttattcgcccactggaacaacagggtattctggttcgccgttcaagagaacaacttgagagagaaattgataaattcatcattatcgaacgcgataacctaactatcgcctgtgccgcgctctacccttatcctgaagagaaaattggcgaaatggcttgtttagcggtgaatcctaaataccgcagctctttaagaggtgaagtattactgaatcgcattgcggaacacgccaaacagctcggactggaaaaactgtttgttctgactacccgcagcattcattggttccaagagcgaggttttgagcccgcagaactctcaatgctaccgattcagaaacaagtgttatataactatcagcgccgctctaaaattcttatgctgaattcggaaccacagcctggattcacataataagccccacaccgttaatctgtttttattcccactgactgacttacttggcgttaaataaatggtattctgcatttccattcta

SEQ ID NO: 3999 - DNA, 754 bp, Photorhabdus luminescens
  misc_feature (552)..(552): n is a, c, g, or t
  misc_feature (637)..(637): n is a, c, g, or t
  misc_feature (754)..(754): n is a, c, g, or t
ctgagtggttatccctctcctgttacaaatctgcctgcaactttccctgagttattacaaaaatcgccccatactcatcctgttaattcaccaataccccatgatttaaggaataatgtttcccccagtacggttatcgctaaaactaacgtgacactgacagccaaagataaggtgctgtttgctggagattcaatgatgcagggtatcgccccccatctgaaacgtcggctctaccaggattacagtatttcaagtattaatctcagcaaacaaagtactggacttgcttatcccagtttttttaattggccggaaactatcaataaaacactggaagccaaccatgatatcaagctggttgttatttttttggggccaaatgatccctgggatatgccaccaaaacatggaaacatctacctgaaatttgccagtcctgattgggaaaacctctatcgccaacgtatcgaaatggtccttaccgaagcacgtaaccacggtgctgatattatctgggttgctcctcccaatatgcgacagaaaaaactntctgccaacatgaaatatctgagatccttgtatcaatcagaagtcacgaaagccggagaaatctatgtttctgttaatgatattntcaaatatcatgcaaatgattattccgattatgtcggcgaccatagtaacaaaattaaactcagaagcggtgatggtatacactttagcctgaaaggccagcaaactatctcagatn

SEQ ID NO: 4000 - DNA, 779 bp, Photorhabdus luminescens
  misc_feature (488)..(488): n is a, c, g, or t
  misc_feature (656)..(656): n is a, c, g, or t
  misc_feature (751)..(751): n is a, c, g, or t
  misc_feature (772)..(772): n is a, c, g, or t
  misc_feature (779)..(779): n is a, c, g, or t
tgccgaaaattaatcaaacttaatttaagccagaatacgagtaccgacgggaacaccgttaaatagatcggtcagttgatctgcatgacgccaactggcgatatctaccggacgatctaatgtcctggctgcatctagagcggcattcaccttcacaatcataccgtcagtaatgatgccatgagcaataagctgttctgctttctcaacatttatgtcagggattttctgccctttaccatccaaaataccgctaacatcagagagcaataccaaatcagcacctagcgtctgagctatcgccgttgctgcttgatcggcattcacattcatcagctcccctttatccgttaccccaatcgagctgataatgggcatataacccgcatccaataacgttttcagcaacttagcatcgcccggcatcgcttttcccacatgccccaactcttcactcagttgggaaaccgtgaccacattaccatctnctaaatataatccaactgatgcaagttgatatttagtcgcccacgacaacaggtcttattggcgataccagccaatgcgccggtgataatcccaatctgatcagcgggtgttactcgtaatccttgttccttcactatcggtagctgcaacttctccatcagctcatncaccagatatccccccccatgaacaacaaccaactggcgttcatgtgtttgccgatattcctgcaatgcagtaaacacaccgttccatgcttccncattgtccagtaacaccgccnctaactn

SEQ ID NO: 4001 - DNA, 684 bp, Photorhabdus luminescens
  misc_feature (108)..(108): n is a, c, g, or t
tgagttcgatggtggtgaacaggcgatacgccgttttctgtctgagttgaagttatttactttggcggaatcactgggcggtgtggaaaccttaatttctcatacggntaccatgactcacgctggaatgtcagcacaggcaagggcggaagcggggattacggattcactattgcgtgtttctgtgggtattgaagatagtcaggatttaatcgctgatttggaaaatgcatttcaggcagtagtaaaggagtgaccatgggtgcactggtagttgcaacggcggaaaatgaccgccaattacataagtttggtggaagtagtctcgcggatgtgaaatgttatcaacgggtagccaagattatggctaattacagccaacccggtgatttaatggtggtatccgcggcaggcagcacgactaaccagttaattaattggcttaaacttagccagagcgaccgtatttctgctcatcaggtacagcaggttctgcgccgttatcagcaggatctgattagaggtttgctacctgagactgttgctgaagagttggtgaagcgttttattgccgatcttgaaagcctaatgccatactggataaccagttagtgatgtgacttatgcagaagtggtggggcacggagagatctggtctgcgcgtttgatgtcggctgtgcttga

SEQ ID NO: 4002 - DNA, 785 bp, Photorhabdus luminescens
aagcttcccagaattagcatcccttgctgaacaagagatcatttctcaacctgagaaatatattaaacaagcgtcagcagagctggatctaagtgctctgacgctgatgctaaattttccgcaagctgccatgcaatcgcaaatcaggggcgatatctctcctgagcagtgggatgatggtttgccgatgtttttcaccaattatcatttaacaggaatgcaatcttggaataaaaatcaaagtgaacagaatcaatatctgaatttacgtagtggctttaatttaggtccgtggcgaattcgtcataatagttactacaaccatacgggtacaacatctgaatggcaatcgcttaaagcctatgctgaacgggatattcgcccattaagatctcgtctggtattgggtgaaacatccaccgatagcatggtattcgatagtttcacttttaatggcattaaattgatgtcggatagccaaatgttgccagatagccagcaagggtttgcgcctgttgtccgcggtattgctatgactcacgcaagagtagaagtgccccaatagaaatattatttatcagacttttgttccaccaggcgcgtttgaaattactgatatttaccccagtaacctgaatggtgatctggaaatatctatttatgaagaaatggcaatatcagaacataactcagccctttgctgcctcaccattaatgatccgtgcccggccaatgaaatatcttgctaatatcggccaattcagcggcggtaacaggccagtaaa

SEQ ID NO: 4003 - DNA, 675 bp, Photorhabdus luminescens
  misc_feature (158)..(158): n is a, c, g, or t
  misc_feature (189)..(189): n is a, c, g, or t
tgcacaatctgtggcgtccagatattaatcgcactcaaggtattggttaaacagaagtaagccagggtatacatcagcatgatcggcgcgaaaatttcacgccatatactgggtttttgcattgcctgatgagttgatgagcttgctggttgaaccanagcgggctggtcgttatccatcatctcttgnaagcattttttgtcctcatctgtcagccagttagcgcgtttgggtgaatcatcaagatagaaccaaacgacaattcccagtagtaccgaaggaaaaccttccagcaggaataaccattgccagccgtgaaggttcatgaggccatccatttccagaatataaccggaagccagagaaccaaacgccatcgtcaccggcattgccaccataaacagtgcgttggcacgggcgcgatagtaagccgggaaccaataagtcagatataacaggatgcccggcacgaaacctgcttcggcgataccgaccagcatccgcaagatatacagactggttggtcccgtaccgaacatggtggcagcggaggatatccccagagcaccataatcgtggctatccagcgtcgggcttcgacaatgcttagcataatgttgctaggaatacccgaaatgacataagtgacatagaacagcgttgccgtcagaccgg

SEQ ID NO: 4004 - DNA, 795 bp, Photorhabdus luminescens
aagcttcttaaggtttttcgcctaaactttatgccacgaactcccttgaatacttaacggcggccattcttggctttcagtgataggtgccgtagccgtaaggtccctagcttgctgtaacatccgctcgaccaagttggtcaacagctcagcatccagcctctccaaccattcacggctccagagcagagtctctccctcaccactacggctcagttgcaatgatggccaatcggccaatgtagccaacgaacaaggttcgacatcacctagtggaataaacaaagttaccaactcatcgcgttggcggatatgcaaactaaaagggcccagaggtagatcgagcccttccgcatgcagagattcttcggtctgcccaacgcgtctgcacagttccgatcataaggcattaaacatggctactctttatggctgtcaacacagattcattcggcggccccaggttaacgatcggcggatcactgcgcgtgcctttgaacctaccacctatggacgcagaccacggatcgatgaacccgtgcttgttcaccccaactcgctcgcattgctgagatcactcgctgggatcgcgcccctcccactcaccacagacctgggcccgttttattcgcccttgcggccccgattatcgactccccttattcccttacggtcatatctacttgcccctcattctctctccctgccctgcattccccacccactgattgatactgcccccttatgattttgtttcccccatccctccattaactactttcctgttattatctc

SEQ ID NO: 4005 - DNA, 798 bp, Photorhabdus luminescens
aagcttcctttttcgccccaatgttcgcacattgggattgataaatagcttgtttccctctttcaataaattaaattttgcattttcaaatatagcggaatttttctgctctaccttgacatcattccccaacgatttcagattaatgcctgaaatccgcggcactcttctgacacgctcacctgaactgttcgacgttggtatcaccctatcgtcagattgtcctttggcaaactttgaagtcgttaaaacgccggtattttccacgcgaatactggcatttatctgtagacgatcaaccgcttgtttagcatcatccaacgcttgtagctcttcttcggtcaatcctttgtagaattccttttcagcttccggccttaatccgcgatcaatatagcctccggtttcccccccgcctgtcgatccatagccattacccgtacaaacccactacactcggtaccggagccatcaggttttgaacaccctatgattttgcccctctaacccgctgtttgcacctgggccattctacttcgcacccgcctgaatatcccgtgtacccccactcttctccccctgactaggccatttcccgtctccctttgcccgctcttctcctcccgcccttgtccatgatcgcccatttgttcctcaatggtcgcatttttcccaccccctctgttctgtagcacccttgtgctctaaccgtcggtcactagccaccgcgcaatagttctgatccgcccaccgctcgtttcccccctaccccacttttcgcattcctccttattcttc

SEQ ID NO: 4006 - DNA, 682 bp, Photorhabdus luminescens
  misc_feature (92)..(92): n is a, c, g, or t
  misc_feature (116)..(116): n is a, c, g, or t
  misc_feature (145)..(145): n is a, c, g, or t
tactgtccgcgggaagctggatgttcaaaataaccgctgtattcgtcaggtacagtggttttttgtttgatcaatttgtttgatcaaatagnactgagcgcaggcccttccttcanataggggataagtagttatcggagtgtgnaaacttgacgttaaacactccgaattttttgacattaagtggatgtccccccgtaaccgaatagcggctggcgtatccagagggcggggagataccctgttgtatgatttacagggatttttgatgggaaaagcctctaatataagtgcagcgttcctctgtacacgaagatattacgacgataatggccggacatccttttactagctgttggggctcggtggtgaatcttatgcttactgcagaaatgataatgttacccgtagttcatttaaagtggatgtataccatacagatggaaaccttacggtaaatgcagtgttaggttatacaccatgtctaaaacgggatatggccgactttcactttcagtggcttcctgatttacttctattgatttcccggtgtaaccgcgaatttaaatcctttgcgtgcggatcatctcacctattgagccacgcggttaatttggttcctccccgtttatacggccggttctccctcgccttctgctcgaactcgccgggtgtttccgct

SEQ ID NO: 4007 - DNA, 747 bp, Photorhabdus luminescens
aagcttattatcgggaaaaacttccacaggaaaatctgaatggggtgcttgtttcagacagaattgccaatgagtcagctccgacattaattgatcataaacctcatcatcgatctcgctgatccctttctgacgatagagctgatcccagtgcgccatctgttgcatcaagctgttagtttcacgttgtaatttgtcctgcgaccattcggggcaattcttttctgtattcgaaacaaaaatttcagccgcaactatcggtgaactgaaaacaatgaacagaattaatatcaataaattaagcatccgttgctccttggctatccatgcataacaacaaaatagaggataaagagatgctgtccaaggcagagataataactctgcgaagcgcttccaagaataactgcctgaaatcccaaggtagcgggctttttcatacactacacaaagcagatatttatggtgaaagcctgatgtctctaatatttgattcacggctgccatgaaccgattcctgcccagaggtcctcatcgaagacagaggcctaatacccgataactcatcaataccataagtccaagggtccattttaatatgccaccacacccaggctcgatcctacaaggatcaaaaccgcccaaaccccttgaaatatggggccgcctttgctatgatgcaatccagccatttactattgaccgccccatccccgcttgggcacccccgatcgcttccggacccac

SEQ ID NO: 4008 - DNA, 685 bp, Photorhabdus luminescens
taggcggcaaccagattggtcagccagtaacatttggttcagcggctgaccctaaaagtgtgctggtttttaatgtagatgataagtcagccgtgaaaaaaattaaaaaggatgagcacggcaacgaaataggcgagtattattctcatcattctctcaacaggttttctgtgcagctttggcaaacgaaggcgatagaccccaagctttctggtgagttcaaaacgtctatggaggcaactctagtcatgaaataacgctgcgctggcaaggtatttaaatatggcatggtggcttagccgccataggtatttcatctcaataaatcgcactatttcatttctcatgtggtaacaaattgacccgttagtcaccagtggagagtaaaatgacaatcaatgttaatgattcaatgctgcttcagataagcggtagccagaccgatttgcctggaggtcagactattaccggcatacaaagtaatcattgggattttcggttgccggcctgtttgtctcatttgaaggatacaccggtgtacatggcagtccccgtattggggattattgaaaggggagtggatttacccaaagtgacaccagccatgtgttccgagtgacagaacgccgggcaacaaatgtgatgaattatatctacatgagcgacctgttgtgatcgtctgtga

SEQ ID NO: 4009 - DNA, 774 bp, Photorhabdus luminescens
aagctttcagtcggaacatcccgaagttcatcagcaatatcgggaaataaccttaaatcagagaaagtacgtatatcttgcaatggatcgaaatccaatattttgcgtttttcaagccaaaacggcgatccggtttcaggcgaaaagtgccaattcatgatttgagacaaataaacgtcaaagttatgaaaatcagtcacatgtacctccatattttaagccaaatttacaaggcattactattcagcttaaaaaagataagaaatttaaatgaatcataaaatagttgagaggctctttctttatctgacaagaaagaaaccacacaacaatacaattttaattgttttttcaaagatggccttaaattctcacaataaatttatgattaagaataattattaaagttagaggtaatcaattaatttaaaaaaacattcagtgattgagaaaatattatcatttattaatcatgatgcgcgatttgcaaaagataaatttcctttgtcaaaacggtatatggctaggcttggacgtttgaaatccattgatttataccccatagatttcaagatgcatcgcgaccgcaagggagccaatccccggcagcatacgtatctaacccgaatgctgcttaatccctgcttgacaaattcccctttcagtttatacactttcacgattggctttttcacttaacgcattcagcactcattcacctaaacccacaacagaagcttttttcctccgcaggcggcatgtttctttaaaatc

SEQ ID NO: 4010 - DNA, 679 bp, Photorhabdus luminescens
  misc_feature (213)..(213): n is a, c, g, or t
  misc_feature (225)..(225): n is a, c, g, or t
gctaattgtggatataaagtttgatcgaagatcgctccattgcatttcacccacccatttggtggtatgtcagtcggccaaggaagtggtattcctaccgggatttcttcaagtaccaacgtgctcattatgctgccctcatcatatagttaaacgctaggttatgtggctttgatacccctatactcgttatctttcaagttgcctctttgntggctgcactcnctcaccccggtcacatagcttatcatgctcccggggattcactgccttgccgttccgatgcatctcgaaaccttcacgggatatgggacagccgccactggggccaactgctgctaacgtgagatattaatgtctatcccaacatggctccattaccttctacgcactatctgaacgaaagcagtacgctaaagagctggcgcacctaccgtaatttccttctccacctggctggcggtctttcacatgctcgtgtttgttgggaacatctcccccactgtgtcgatctttcgcttgccttctggccaatcctccgtatcaccctgactcctatcccctgattaaaaacactccgcgccgccaaggcccccactatacttcgatactaacatccccatgactgtgtgccgcatgtctcatccccatatcagacggtctcaaccattcatggcgg

SEQ ID NO: 4011 - DNA, 764 bp, Photorhabdus luminescens
  misc_feature (613)..(613): n is a, c, g, or t
  misc_feature (658)..(658): n is a, c, g, or t
cgcacactttatcgagatattgctttactaaacagtcagggggcaaatatagagggtgagccaggtttgggctatatattacggccgggcttcatgttacctcctttaatgtttacgatggatgaaattgatgccttagttttgggcaataaatgggttattgaacaaaatgatgttgttttggctaaatctgctcatagctttatatctaagattgccgcagtgttgcctgaagaacagcgtgatcagctatattattcgccaatgtttgtaaaaacagaaggttacagcaaagttacaaataataacttaatgttatctgatatcagaagggcgatataccataaatcaaaaatagtgataacttttattgatttaaataatacacatattgtgaagacgacctgcccactgtcgatctttttcaataatgaattctttttagtttcttggtgtgaattcagtcataattttcttaagttacaagtagggaaaatagagaaactggaagtattgtctgaaaaatatatccaagatagaatattattactaaaaaaatggagtgagaaagagggattgtctgataataatttatcctaaataaatgattacngatgagtaatttatgtgagtatttatccctattatgcctaatcgntccttctattaagtatagagtcgcaatatagagtaattctgatggtatctgaacttctactttattatactgagggttcaaaagttagcgattcattaggttgcta

SEQ ID NO: 4012 - DNA, 683 bp, Photorhabdus luminescens
  misc_feature (646)..(646): n is a, c, g, or t
cccttccaatgaaatggagaaagatcgcaagattgattttagatatgacagatcctttcccactctggcgaccagagtgggaagtcttagttaaaagttaatttaaaagagtgtcttcttgacttggtttgcgaagctggcaccgccgtcgcaggcggtataatgcacctgcaccagtacatcatccatattcgccaacagtgcggcctgcatctcatccgccttcaatgttttatcgtcaatatgctcatccaccgaacgcgggaaggtaagcgtccatttggagaccgcacccgtgccctcaaacgatagatagcgctcatcttccaaacgcagctcaaagctaccggcatcattaatgccagaagagagcgccacctgctggctggcccgcagattggtgacaatatgcgtcgcatccccctctttacctgtcggatcattgagacgtttaacaccattgatatctgctgtgagccgcggactaatggtgggtctgggggagcgttgccttcacgttttgataccgcccgatcaacgtcgggaagtgtcactgaccacggtcttaatctggcgcaaataatgccccggatagtccgtgtcaaacagctttttcgcttaatggaaagtcaactctgccctcagnttttaacttacccaagccctcacaacccaatagcttt

SEQ ID NO: 4013 - DNA, 758 bp, Photorhabdus luminescens
aagctttaatgccatatctttattatcaataatttcatattcattaaattctccaatagaaccggataaaaaatacgaacttttaaaaaattcaaccggttccatatgaaaacttattgtctcacccatattgaattatcctacagttttactccagagatcaaagacgctttgtctgcctgtttaatttacgtatttcccctgaatatcagtgtatacatctctttggatttaataatattgccattatccatatttttttagctatattttgtatgtgagtcactttttcgatatggtatcagttgattgatttaaatttattttatccagagcatttcttatgacatcatgattaccttgatgccttgccattgcactaaccacacggcgttggcgtggcatgggtattcacccacggtaagaaagaagccagccggaagtgattcccgctttttgttcgttcagagaaaaaaccgaataaaatagcaaaaatatatcttatgtatatatctatcgctaatattatatttttctgtatcatcccttcgtttatcttattatccattctatattttcggcgattctaagctatctatttaatatatcaagcccaaccctgtaagatatccattgtacgcctaaaaataatcaagtcgaaagatcacggcgatctttccggctttgttaactattaactcccacccatatggatatgcatgactcggccaccatttgccgcttgactccctgatccg

SEQ ID NO: 4014 - DNA, 661 bp, Photorhabdus luminescens
atgaccgtgctctacgtcaaggtttagaggatagccagtaatgaagcgctccggcggtaatacctcatggttcggtagtaataccgtatggtttgtattgctggcagcgctgatgttaagcggttgtagcagtgcatggcaggcaacgaagaaagtcggacaggtagtctgggacccatcaactccagttggtcaacctgcgaacttaccttccaccgtcgcgatcactttgctggcagaacctgatattaaccccaataaaaatggagaagccactccggttgaaatgcatctgctctatctcagtgaagattcccgtctacttgccgctgattatgaccaactggcgagtgacaagctggataaagcactggggaaaaattatatcgaccatcaggattacaccttattgccggggcagtacaaaccactgccagtcatcccgctggaaaaaaatagccgctacatcggcgttatcgctcgctatgcccatattaatcaatccgaatgggaaaaggtcatccgtgtgaaagacacaggacagcaatacccacattctggtgcatatcagagccgaacgaagttgaaccttataaaagaggagcattaactatgcccagccaagatccgggtgatctggcgccaggattattcatcaagc

SEQ ID NO: 4015 - DNA, 770 bp, Photorhabdus luminescens
aagcttataaccctgatgggttggttcagcgtacggttcgtgcgttgaaagatgccattcctgagctaggattgctgactgatgtggcattagatccattcactacacatggtcaggatgggatcatcgatcaagatggttatgtgatgaatgatataaccaaagagatcttggtcaaacaggcattgtcacatgcagaagctggtgctgagattgtggcaccgagcgacatgatggatgggcgtattggtgcaatccgtgaactatttgaaacggaaggacatgtaaatactcaaattatggcttactccgctaagtatgcttctgggtattacggcccattccgtgatgcaatcggttcaaatcgtaatctgaaagggggcaataaaaaaacctatcagatggaccctgcgaatagtgatgaagcattgcaggagattgcacaggatttgcaggaaggcgctgacactgtaatggcaaaaccaggtatgccctacctggatgttattcgcagggtaaaagatacatttggcgtaccaacctttgcttatcaagtctctggcgaatatgccatgcacatggctgctattcagaatggtcggctaccggaacaggtaattgtggagcctctgttatgcttcaagcctgcatgagccgacggtgtactgacctatttcgcaaacaggtcgctcaacagttatatgaacagaaacgtcatatccgatcaaaacggtcaacgcaactccgcccgctctttgcccggtaaattc

SEQ ID NO: 4016 - DNA, 679 bp, Photorhabdus luminescens
  misc_feature (606)..(606): n is a, c, g, or t
tgcatgatctggttaatcatttggaattctcctatcggatgaaatttaaataactgtactgccaaatagaaattcataatttctggtgttgtcattaccttaattccaccacaacatcggaatatgaaactggcagtttcctcaaggatcttttccaaagtataacgtaacgcgagaatcttatggacggcgttttcatcctggctagcataaaaggcaataatcaacatctgaccgagaataacattaatcttataatcagcttgggtcagagtatatttaattgtttgctgttctactactttctcaggaataaaacgagtcagcccatcaagaatacctgagtatgtattagcacgccagttattttatttgcgctaaaccctttgagaaaaattttttggtgttccccaccccttaattaggaaaaaggccgggaaatgaaatttccggatcccaaaatttaacctctttagtatcaacttcaaccctaaacccccatcgccaaaaaggaaaacccttaaaggttcgatctgaattaaaaaaccaaacccatcccctttgccctttattatccagctccgcgacccgttacccccaatattnccccccccaaataaagaccacggtgttttctaacaataaaaaaaaatttccccttttaaaagtctttaaccag

SEQ ID NO: 4017 - DNA, 738 bp, Photorhabdus luminescens
aacggtaaactccaggcgaaaagcctgacattgacacaaggccccaaccagattgatttcaaacgcggaacccttgttcccatgacaggggaagattatggcccttgggaagcgattgataccgggttattagggggaatgtatgccaataaaatccgtctggtgagtaccgagccgggtaaggttgtcaatctgaccaacctgacggcaacccaaggcgacatcagtctgacggcggatggcaaggtgactctgggggatgtacaggccaaaacggatatcaccgttaacggtaaagacattgacatggtgaaaaaaagtcatatgcaagccggtcaacatctgatattgacaaccgatacattgcagagttggggacgaattcgtgccgacggtgatgtcactattaaagcgaaaaccttgtctttagatgggggaaatatcaccgccgggaaccaggttctgctacagggaaagaacagttttacggtgcgtggcacggatatttcaggtcatgacattaccttgattgccaatagttataatacttctgtttcacctagtgacacgtcggaaagcacacaagtattacctattatttctgcggttaatacgctgcgtattctgtctgaacagggaatatcgctttcagatacgctaattaaccgggcgaaaaatatctttatggcgagtaatgggtggattggattaatcagcatttggcggcggatgagaatt

SEQ ID NO: 4018 - DNA, 658 bp, Photorhabdus luminescens
catgggtacgaatagtgatttttgtaatgtcattgatagtcttaccggcgtctttcaattgttgatgcagactgatcgccgcttccaccgcagtttgcgcatgaaattctgccgggaaagcgatcttgaacagcacgttttccatcacataagcgccataggcacgctggaatttaaaaggctgaccattgaacaggacatcatagaatccccacgtttttgcagttaataccgagggatatcccatttcacccttttgcgccatcaaagccaagcgaaccgcgcgggatgttgcatcaccggcagcccaagatttacgtgagccagtattgggagcatgacggtaagttcgcaatgattgaccatcaacccaagctagcgataccgcgctcaagatctcttcccgattcaatcccaacatttcagcaacaacagcggtcgaagccacttttaccagcacgacatgatctaaaccgactttattgaatgcattctccagtgcaagacatccctgaatttcatgcgctttaaccatccccgtcaaaacatctttgatcgtaagcggctttttcccaccagcaacggcatttcttgatagccagtcagccactgctaagatgccaccgaggttatcggatggatgcccccattcagcggc

SEQ ID NO: 4019 - DNA, 745 bp, Photorhabdus luminescens
  misc_feature (658)..(658): n is a, c, g, or t
gtttccccaacaccacgttcataaacccgtaagcgaatatgaccacggtttaaaatttgcatgaaaccaatattcgcccgttcaggaaatctttcgtggctttccaaagctggccccaaaatgtctacttcggccgtttccacatctggcacttgaatcacacaatgaggattccccatagagacaacaccacaaagaacagttctctctgctacccgtaaaatataggttttttccgcccttaacgcacgaaatggcacatgatgcggctcaaattcaggctcccccatattaacgcaaacctgatcatcattggtgatactcaacaccatccgtcccgattgcgtgctgactttaatatcacgcttattaattaatcccttaaggcggacaaaacgggcaaaacaacgcgctccattgccacattgtgcaacttcactgccgtcagcattaaaaatacgatagtgaaaatccatatccggatcataaggtgcttcaacaattaataattgatcaaagcccacaccggtatgcctatctgccaaacgacagatcagctctggtgagaaataaacattttgggtcacagcatcaacgaccataaagtcattacccagaccatgcattttggagaactgcatatcatgctccaccgtanaccgtagcgactaactatcggcttatctcgcttatttctgagaggtactatccacttgctgcccttgctgctcagtattcgcgggaa

SEQ ID NO: 4020 - DNA, 673 bp, Photorhabdus luminescens
  misc_feature (447)..(447): n is a, c, g, or t
  misc_feature (619)..(619): n is a, c, g, or t
  misc_feature (659)..(659): n is a, c, g, or t
  misc_feature (673)..(673): n is a, c, g, or t
catcacgactaatcgtttttttgataacaaaaattaccctcgcgggttctcccgccatggcgatttcaccattaaagaggcgcaattactagagcgccatggttatgcgttcaatgagttagatcttggtaaacgcgagcctcaaacagaagtagaagagctgtttgttgctgtttgccggggtgagcggcagcctgtgacaatagaagaaaaagtctggaccaaatatcttgcaaggattaggcgtccaaagcgttttcatactctttcaggcggtaagccccagatcgatgcttctgatgactataccgacactgatgattaatattatcacaagttatgaatataggggctttgcccctttttcattgctaacctgattgtttttgtaattgtattaataacctgtccatactgcgatagcttaaggcttccatgatatgtggnttttctatctcttttttttcttctaagtcggcaagtgtccgggatgttttcagaattcggtgccatgctcggattgaaagccctagctttattagagtttgttctagaaatacagcgtcgttaggtttgagcttacaaaatgcctctgtctctttactattcagatgagcanttaattttccacaacgtttcagttgtatttctcgcgccgncagtactcttaatn

SEQ ID NO: 4021 - DNA, 743 bp, Photorhabdus luminescens
attaataataaaggaaacctatcgaaaacccttaaggatatgggaagcagcgataccgttaaatcaactatcacatcaatggcgatgggtggcgcactggcgggttttgataacgtcatgggatgggataaagccgccaatggcgctcaaattgacccggcaaaagcgacattacctaaactgagcaatggcgactggagcaaagtggctcaacggatcgccggtcaatccattatcagttccagccttggtacagccatcaatggcggtagttttaaggacaattttaccaccgcattacttgccaatattggcagccagattaacgccgaaggtgccgggttgattggggctaacggtcaggtgttagatttacccggaaaagccattagccatgcggcggtttctgcccttgctgcggaaattggcggcggtgatgccaaaggggcggcggctggagcattagccgcagaattggccgcgataacattggataaaacattcaatgatccaatgaaaattcaggcgggtggcaaaatcatcggcagcgtcgcaggggccattgcgaccaacagcgccaaaggggctaacagtggggctaatgccggggaaattgttattctctttaaccacctgaactccatgaatgcctacaatctggctagagagctccaggaagccaataagcaaggaacccctaccgaagcaatctggaacaaatacaacaaactgggcgctacacc

SEQ ID NO: 4022 - DNA, 668 bp, Photorhabdus luminescens
  misc_feature (666)..(666): n is a, c, g, or t
gttatatgcaggcatttgtccggtatggtatgaaacatcatgctttgggcaaagaatttacggattggttagtggcgttgcaggatcaggttaaagaataattttacggaaatttagggattatatgaaagttacggtgtttggtattggctatgttggcttggttcaggcggcggttttagctgaagtcggtcataatgttctttgtattgatatagatgcaaataaagttgaaaatttgaaaaatggccaaattcccatttttgaacctggattagctccactggtgaaaaaaaattatgaagaaggccgtctgaattttagtacggatgcaaaggccggtgtggcacacggtaaattgcaatttattgctgttggtactcctcctgatgaagatggttcagcagatttgaagtatgtgacagcggttgctcgtactattgcggaatatatggatagctataaggtgattatcgataaatctacggttcctgttggtaccgcagataaagttaatgccgctgttaatgagactctgcgtcaacgtaatattgatattccatttgatgtgggttctaaccctgagttccttaaagaaggcgcggctgttgcagattgtatgcgccctgaacggattattattgggtgtgacaatgaaagagtcgntg

SEQ ID NO: 4023 - DNA, 745 bp, Photorhabdus luminescens
  misc_feature (727)..(727): n is a, c, g, or t
atcttttacgtcgtaaaatcgagatatccaggatagggtttcttagccaaaaaccctatccctatggaccctctaatatctggctccatactagtaccactatttctaaaagctactgtcttctcttaaggagtaaataaatactcacagtaaggaacaataggcttggtaatagtgccgccaaaaccgctggcacgctgtacaccaagctcagtggaccaaagatctcattaagtacataaaataggaagccaaagctaatccctgttactatcctcactcccatcggcacactgcgcagtggtccgaagataaaagagagtgccatcaacatcatcactgcaactgaaagcggcgcaaatatttttttccacatattcagttgataacggcctgattcctgttcactctgcttaaggtatttgatgtactgatataagccactgatggaaagcgcttcaggctcaagtgcgactacattcaactgttctggcgtcaggagaattttccagtcagcagaaatacgttgtgatccggtgatttttttgctgtctgtcagatcagattcttccacctgagaaagcttccataggtcgttatccttatcataaaccgcactggctgcatattttacagagagtagttttttatcatcattaaaatgatagatattgacgcctttaatctcggtatcactcacaatccgctggatgtagataaaatcgtncccatctatcgtccacat

SEQ ID NO: 4024 - DNA, 803 bp, Photorhabdus luminescens
  misc_feature (721)..(721): n is a, c, g, or t
cttcagggtacacactttatgctttcggctcgtatgttgtgtggaattgtgagcggataacaatttcacacaggaaacagctatgaccatgattacgccaagctatttaggtgacactatagaatactcaagctttaggctttgagttagtcggcttggagtttattcgtgcacgtgtttctacactgcggatttatattgatagtgagaatggtatcactgttgatgattgtgctgatgttagccaccaggtcagtgcggtattggatgtcgaagatcctatctcagtgctttataacctggaaatttcttcacctggcttagaacgcccattgttcacgactgaacattaccagcgttttattggtgaggaagtcagtctggttttacgtatagcaatgcaaaaccgtcggaaatggctgggcattattaaaactgtcgacggcgaaatgatcacggttacggtggatggaaaagatgaagtgttcgcactgagcaacatccagaaagcgaacctggtaccccacttttaaagttcggatgaggcaactaggatgaataaagaaattctggctgttgtggaagcggtttccaacgaaaaatcccttccacgcgaaaagatcttcgaggcgctggaaacagcattggccacagccaccaagaaaaaatatgaacaagatatcgatgttcgtgtcagcattgaccgtaaatctggtgattntgacactttccgtcgttggttagttgttgaagaagtgactcagccgactcgtgaaattacgctagaagcggctagatttgag

SEQ ID NO: 4025 - DNA, 812 bp, Photorhabdus luminescens
  misc_feature (16)..(16): n is a, c, g, or t
  misc_feature (29)..(29): n is a, c, g, or t
  misc_feature (36)..(36): n is a, c, g, or t
  misc_feature (691)..(691): n is a, c, g, or t
gactcatggaacctgngctggggaactcnatggagnaacgctgcccgcatgcaagcttccatcaccggctaactccttgccgccatgcgaactcgaatcaccgaccaaaataatgggacgtgacatatttccctccattaactaatgattaaatattaatttcagcttccaacatctggctatcatgacgccataacttgattaaagaaaacttatctaaataaaactcattgaaataaattacataattatgttaatcaaacacctaaaaaatttacatcattaactgtttgaaacaaaaaattatacatatttaaattatcaaccttgatatccatcagctcaaaatataaatttacattaatatttgatcataaagagagcaaaggtaaatatgaaaaattttgaagatttctatcgggaagcactttcacaaataaagcatgatctgagcaacgcagcgcaagagcatccacaccttgctccatttacctccgaatccggtgaccctgatgttctccgattactggaaggttttgcgcttacaactgccggtattaagcagaaaattgatgatggcttcccagaagtcattaaccctcttctacgaaaagtatggccgatacctttacatccgatcccttcaaccagcattgtccagctagatatgcaaccgggcagcatgactganaccacaagcattgccaaaggcagtgaaatttccgccatacagcagaatcaatccattacattcagaaccactcaagatatcagtattgagcctattaccttgatccataaaacgctgacac

SEQ ID NO: 4026 - DNA, 672 bp, Photorhabdus luminescens
  misc_feature (612)..(612): n is a, c, g, or t
atttagtagcttatctacaccatgacgggctgcatgaatttcaccttgagtgagttgaatacgtacacgggtaatatccacaggcaactgattattgtctgcgacttctgctgcacgttccagatactgattggtacgaaattcatctccgcgttgttgggctgcttcagccgccagtaagtagttgactacaggttgttccgcatgatcagcattacgggtcagtaattgctcaacttgtttgaaatcgccttctgccagtttgagcaacgctgcttttgtttgggcatgggcacggctgcgtttgcgtccaaggaaccagccacgggtacgtgagcctgtgcgtataactctgcggtagcaccaaccaaagaggcagagtaccagttgtaaaagaacaaatataatgaacaggccggtaacactggtttcaatgttgtaattgtcagtttgaatcagcacatatccctgatggccagcaattatcggaccgagcacaataccaacaatgagtaccacaaacagtaatagaactttcagcataacttaaccctcctgattagtttcagaagattgggaaagtaagctgcgaacccgggtttgcatcagttnttccagtaaaggctggcttgaaaggtggtctggcgcagttatggaaacaggctgctggct

SEQ ID NO: 4027 - DNA, 751 bp, Photorhabdus luminescens
  misc_feature (698)..(698): n is a, c, g, or t
  misc_feature (751)..(751): n is a, c, g, or t
cgccacatacgatgcatctttcgcatcttgaggggccattaaatgcaacgttgcaccgctgccaagcccccaatatatcgccggaatcgatgaatcgaaagcaaaggaggaaaccagtaaaaatttctccggtactatcgagtatgaattaaaccgcccagcagtggatgcgctcaacgccccatgctggatcatcacccctttaggattacccgttgaacccgaggtataaatgacataggcaagggaatccgctgtcacacttgaggtcaacatcggttcagtacggggctgggcggcaatttcagtctcatcaagcaagatagtgcaaacgctatccgctggtaaattgaccttatcgatactcttgttatcgacgataaccaaaccaacatggctgtcagccaagataaaacttaaccgtgccacagaataagtgggatctaatggcaaataagcacatcctgctttcaatatcgctagcatgctgacaacaaagtcaatgccaggctccatcaaaatagcaaccaacgggttgttgtcagcacctttagtcaacaataattgagcgatctgattagcccttgcatcaagttcagcaaaactgaggctttgctcctgatagcgaattgccactcgttcaggatactcagccacccgctgttgaataagctgatgcacaaaaggttgcacctcangcagttgccaagctgattgatgagatttgtccaacacagcttgttcctgctan

SEQ ID NO: 4028 - DNA, 670 bp, Photorhabdus luminescens
tgcagaactgtaaggagaatcagcggacacctatcctgctgattgatggtattggttcaatgaatggtttaattccggttgcagaattaacgcgacagttggctgctgctggaggctatgtctatgtagatgatgctcatggtatttccattatggggcgtcatggtgcgggttatgcttttgctgcacttgaccatattttgccatccaacctcatacttgcaggttcattatccaaagcatttggtggtgccgggggttttgtggtggttgcaggtgccgatgatgtcgaagtgatcagtaccttagcgaatcctctggtttttggtcattcgatcatggtgccgatgttggccgctaacgttgcctcagcaagacttcatctcagccttgagatagacatccggcaagagcagttatggaacaacatcaatctgtttgattctctgatggagaacagtttgatgaatgcgggtgtgcaatctcccgttcgcggcgctttattcgaaaatgaagcggaagggcttgaagctgctcgtttgctgcgtgataacggcatcttattattcccggtattttatccactggtcccggatggcaatgcaatgttacgctttgctttctctagtgagcatcaggcaggtgaaatcaagcagctagcaaatacctt

SEQ ID NO: 4029 - DNA, 757 bp, Photorhabdus luminescens
  misc_feature (551)..(551): n is a, c, g, or t
cacccttcgttatggaactcccggtttaccatattccacatctaaaaaccttgcttctgcaaacatggcaacgtctgaaaggttttgttatccgtgccggtaaagtaatcgttatcgccagtatgtttattggtgcactcaacagcttctcattctctggtaagacagtggatagcatcaaccaatccgctctggcttcggttagcaagattattacgccagtattacagccaattggcgttcactcagataactggcaagcaactgttggtttgataactggtgctatggcaaaagaagtggtagttggaacattaaatactctgtataccgcagaaaacattgctaatgaaccgtttaacgcagatgagttcaacctgtttgctgagctgaaagatgcagttggtgaaacttgggatagtttgaaagagacattcactctgagcgtgctgaccaacccaatcgaagccagtaaaggtgacggtgaaatggatagtagctctatgggaacaatgagtgccaaatttggctcctctatttcagcttacagntacctgatctttgttctgttatatgtgccttgtgtctcggtgatgggcgcgatcgctcgtgaaaccagccgcggctggatgacattttccattctgtggcgattgaacgtggcttattcaatttcagccctgttctaccaggtggtaactttctcacaggattcacaaagcaggctgatcatcattttgaccgtccgtcttttaac

SEQ ID NO: 4030 - DNA, 675 bp, Photorhabdus luminescens
  misc_feature (536)..(536): n is a, c, g, or t
atgatatctcacggctaacctccagcatcggtggtgatgtggcggagcattgggcgatgcgacagggccattcctttgactgctggctgatgcaaccagtagataaagcaatgccggtgattacccgcaatatcgaccgcagtatctggcgcgatctcatgctgaagtccgggatgttgacgttaatggacgctgaggcgtgtagtcagtgggctaagaacctcgaagaaggcgatcttccggcaatcagcgaagcgaatatcctgagtacgtttgagcagcttcatcacaacaaacaggaggtctttgaacgtggcatcatcaatgtgttcaggggattaagctgggactacaaaaccaataatccctgctgtttcggcaagaagatcatcatcaacaatctggtgaagcatgaccgatggggctacagcctgaactggggctggcggcgtgatcagttagccgatctggaacggatgcttcacctgctggatggtaaaaccattcccgataatcggcatgatgtttctatccgngttatggattttgtccgcgataatccacatcagcaggtcttcgaggatgatctctttatcattcgttattttcagaaaggcagcggacatatcacggttaaacgccctgatctggtagagaagatgaatgatatcgtgg

SEQ ID NO: 4031 - DNA, 765 bp, Photorhabdus luminescens
agccgagcatgacaaaaatttctctctataccctaatttcaagatgcattgcgacagcaagggagcgaatccccgggagcatagataacgatgtgaccggggtgagagcgcgcagccaacaaagaggcaacttgaaagataacgggtataaatctagatttacgtacttttgaatattactcttatttaagaaaatttgagatttatcaaattaaagttcgatggtaaaaatctcccgaaattattcaatatcaggagattttatttagaaaagataattcgctttatcgattcaattacagaatacgactaatcagtttgtctacccggatgcgacgtaaacggcggataagtttacgtactttgactgggtaaagctggatgctgtccaattcctgataatcactgacaaccgtagtatgagtacggatacagtgcagttcttttgtacgttgctcctgcatttctttatgaggatcgtgaataagaatggcattttctaaatccagtccccaggcacgaggattaagattatttcctgtaatcaattgccattgattgtccacccacacaccttttaggtggtagctattatcaccatctttccataacctgatagtcagttgattgttgtcaacataacgctgtagtctactgatgaaacggcgcagattaatttcatataaatagggtaatgcaccgataattttaaagggttcttccggtggaatataaaaatcgttggcagttttatcaccaacaatt

SEQ ID NO: 4032 - DNA, 684 bp, Photorhabdus luminescens
gtcaattccaatgaacctgccaaacgtctgttatgtcagggcatggttctagccgatgctttttattatatcggcaaaaatggtgaaaaaatttgggtttccccggctgatactatcgttgaacgtgatgataaaggccgtatcgttaaagcgacggataaagaaggccatgagctggtttataccggcatgagcaaaatgtctaaatccaaaaacaacggtattgacccacaattgatggtagaaaaatatggtgctgataccgttcgcctgtttatgatgttcgcggcaccaccagagctgacgctagaatggcaagaatccagcgttgaaggagcaaatcgctttttgaaacgtgtgtggcgcttggtttatgaacatagcagtaaaggggcaactcaaccactggatatcacaaacctgacagtggaacaaaaagatctattccgtgacctgcacaaaaccatcgctaaagttacagatgatgttggtcgccgtcaggcattcaatactgctatcgctgcggtaatggaattgatgaataaactgacccgcgcaccacaggatactgagcaagatcgcgctctgatgcaagaggcactgttggcggttggccgtatgttgccacaataacctctaatgctggcttatatatgtcgaaggctctggggtggtgaacgttgt

SEQ ID NO: 4033 - DNA, 755 bp, Photorhabdus luminescens
tcttgcccatttatgatctttcttatgagatgaccaccttactctccccagaagaaggtagtactatgcgtaaaggtgttaccagccaacgcacggcctggcttaaacaacaagcgtattactatctggaagccggtattgatattgaaataaaagtggtatggcataatcgaccttatgaagcgattatccaagaggtcattacaggtaatcacgatttacttctgaaaatgacgcataaacatgacaagctaggctccttgatttttaccccacttgactggcaattactccgtaaatgtccatgtccagtatggatggtaaaagatcagatctggccggaccaaggctcggttgtagtcgcggtcaatttatccaatgaagaatcataccaccatgaattgaacctgaaattggttaaggaaactcaggaactggcaaatcaagtcatgaaaaatccggaaattcatttggtcagcgcttatcctgttgcaccactgaatatcgctattgagctacccgatttcaacccaagtgtctataaccatgctctacgtggccagcatcttattgccatgaaagaattgcgccaaacattctgcattgatgaaaaatatactcatatccatgaaggattaccggagagtgttattccccaaatgtgtgatgagatgaatgcgggcattattgttcttggtatcctcggcagaactgggctgtccgctgcttttctgggaaataccgcagaacatgtg

SEQ ID NO: 4034 - DNA, 675 bp, Photorhabdus luminescens
attggtgagctgtattcgggggaattaggcagcgcagatagcaaagttatataccctatggatttcgagatgcatcgcgacggcaagggagcgaatccccgggagcatagataactatgtgaccggggtgagtgagtgcagccaacaaagaggcaacttgaaagataacgggtatagacgtaaatgagagttattttgttgttacatctaaagtggaaggtaagtgatggctaagatttacgaattctctgccaatgatatagcaactattgaaagtcataaacatttgcccaatactatgaagtatggaaacggcaatggtggtggaggtggtgatatgttggaagctcgtgtagcaaaacttgaatcagacgttgagcatatcaaagccacaatgagcgatgtgaaggctgatctgaaatcagtcatcagtgatgttggcacaatgaagaccgacgttgctgttatcatgcaaaaattagatgtaatcaataatactttgtctaagaaaccaagtgaagaacagcttaatgccagattaacaaagtcagagaatagatttgattccaaatttacagaagtagagggcaagtttgacgccagattaacaaagtcagagaatagatttgattccaaatttacagaagtagagggcaagttcgacgccagattaac

SEQ ID NO: 4035 - DNA, 753 bp, Photorhabdus luminescens
atcagaagcgctgcccctttgttatcgatacagttattgacttagcacagcgcagccgccgccgactgatggtgcgactggtaaaaggcgcttactgggatagcgaaattaaacgtgctcaaatcgacgggctggaaggttatcccgtttacacccgcaaagtttatactgacgtttcttatctggcttgtgcccgcaaactattgtcagtacctaatctgatttatcctcagtttgctacccataacgcccatactttagctgctgtttatcatatggcgggccaaaactattatcctggccaatatgaatttcagtgtttgcatggcatgggagaaccattgtatgaacaagtggtcgggaaaatcgctgatggtaaattaaaccgcccatgccgtatttatgcaccagtaggcactcacgaaacactgttggcttatctggtccgtcgtctgttggagaacggcgctaacacctcttttgtcaaccgtatcgccgataccacattaccactggatgaactggttgccgatccagtgacaaaggtcaagaagctggccgaaaccgacggccaaatcggtcttccacatcctaaaatccctctgcctcacaatttgtatggcaaagatcgcgcaaactcagccggtttggatcttgccaacgaacatcgcctggcttctctttccagtgcactattaagttctgctaccgaagagcagtatagcgagccgcgactgggcggcaattatcacc

SEQ ID NO: 4036 - DNA, 674 bp, Photorhabdus luminescens
  misc_feature (381)..(381): n is a, c, g, or t
atcatccggggggcggtttgcaggttatcgacaaccgtttggcggttaagactggcaatggcatcgcggtgaaaccggaggggcttgcgttaaggctacagcccaatgggggattgatgttggataaatctggggcgttgtcagtggatggtactgtagccgtttcggcacaagcttttaaattgcttcctgaggagacgcggaaacaaattgccaagttgttattgaatgctgagacagaaaacagatgacagagaatagatgacggtgactgcctaatacggcttttgaggacatattatgactgataaagaaatgagttctgttgactcattgaaagcgagttttaagtctggtgttccgcctatgcctgaagcattntctcatttgattgatgaggcatatagggcatatgaaatcattgatggtgataagcgggatggcccgaccgcagggctgggacgagatgacaaaggaaaactagccctcaacactcaccattcttggcgggtaaaccttgatcagagagctttggccctgtcactgaagctagaaggtgggctctcttttgatgggggaaggcgtctgaaatagatgccgatcggcaggttcagtttgccgattttttcagtttatcgcggtgggagcggatggagatcgcacagttgttgggt

SEQ ID NO: 4037 - DNA, 742 bp, Photorhabdus luminescens
tcgctttttttgtcccagctactgtaagcgtccttaacctgattccactggacatcattgcggccttgaagatttttcagccattccgtaccgggagtgtgactcagtacccctaacgcgtcttccagtaactgcccctctttcactttcacatccgcattgatgcctgtcgccgcctccaccgtcagcgtaccgccaacatgcactgaggggattatccaagtctcctcacggtgacctttatcgcgctgtgtaataaaaaagccttttgatgtcgtgatgctctgctcaaaatcaatattgggcatcgccttgaagttcactttccctgtctggctggtgattttcgcgtttttaccggtttctatccgactcgcttccaatgtcacctcatcttttgccatcaggttaatatcacccccggccgtaaattccgtgactttgttggtcttcttgatttgtattctatgttcggttttagacccaaacactttacacgactttatgggccccaaacctttacagcttttctctgtttcttcccgcctgtagacttcttccatcgcttgcgcatagagaaagccacctgttgccgcaatatccatcacccctttggcgattaacgccgtcgcctggaataaaatactgccctgagagcgaatagttaatgcgccaccactattcagccgactggcgtgttgcgtaaagcgctcaatattcccctcgcggataaattcttgtc

SEQ ID NO: 4038 - DNA, 662 bp, Photorhabdus luminescens
  misc_feature (549)..(549): n is a, c, g, or t
cgcagaagaagacaaaaatgatttcgctgaaaatagcgcttatgttcatgcaacgccggtgatccgtcgcctggcgcgtgaattcggcgttaacctggctaaagtgaaaggtacagggcgtaaaggccgtgttctgcgtgaagatgttcaggcttacgtgaaagacgcggttaaacgtgcagaatcggctcctgcatcagccggtggtggtctgccgggtatgttgccttggccgaaagtggatttcagcaaatttggtgaaattgaagaagttgagctgggtcgtattcagaaaatctctggtgctaacctgagccgtaactgggtggtgatcccacatgttacacagttcgacgaaacggatatcactgaagttgaaaacttccgtaaacagcagaatcaggaagctgagaagaaacagcttggcgtgaagattactccgctagtattcatcataaaagcggtagcaaaagcgctggaagagatgccgcgctttaacagctctatctcggaagatggtcagaaactgacgctgaaaaaatacatcancattggtgtggcagttgatacacctaatggtctggtggttccagtgttccgtgatgttaataagaagggcatcattgaattgtcccgcgagctgactgagatgtctaagaaaa

SEQ ID NO: 4039 - DNA, 727 bp, Photorhabdus luminescens
ccccgcagtgactagagctgcatgtattgttttgaatggtaacagcaaagataggtgggcatctaatagcggaatagcaccatagctggcgtaccactcggcaacacgctcattcttggcatcaatcagcaatgcaaccccgccagcctgtgcggccaccaataaacagcgccgaccagcggctagcaacaactgaccaccgagtccttgactctgtactgaaagatctatagccagacggccaagccgaaatactggcacttcatgtcgagccagaccacgtttaatcacttccggtgcacgttcataagcaatagaagcgggacttagactgtagtaacctaataccgttccattgttcttgctaactgcaaggtaggtttttgccccacctttctcatggctctgccttgcatggcgatgtaaaaactgattcaacgcctcatcaccacagtcaaaagcaccacgatcatgatgtttgcctataggttcttcgtgccagattggtagcatcatgattgtttcggcaaggcaaatgctgcggccaacaatttatcattgggtgccggtgggttatccaaaagatccagaacatgcaaactatctctttcggtcagctccagccgttcgttctcgtcgataactttccgtgctgctggcatcacattggggagcacgaactcagtcaagttggtatggtgtaaagcgggtgcacgcatcaacagcg

SEQ ID NO: 4040 - DNA, 645 bp, Photorhabdus luminescens
  misc_feature (479)..(479): n is a, c, g, or t
cgcaggcatgattatcacttggattgcaaaaagctttgatgaagatgttgattactacgtacccgttgctgaagttgagcaaattgagaatcagcaccatgaacaaattagcaaggcaggtctgaaccatgtcaactgaaactatgactaaccacaatcatgcccacgagcatcacgggcaccacgatgcgggagccactaaagtattcggtttctggatctacttgatgagtgactgtattttgttcgcatgtctgtttgcgacttatgcagtactcgttaacggaaccgcgggcggtccatctggcaaagagattttcggcctctcttttgtattggttgaaactttcctactgttattcagtagtatcacttatggctttgccatgttaggaatgaacaaaggaaaaatcggccaggttaacgcctggctcggtatgactttcctgttcggccttggcttcgtagcgatggaattngacgaattccatcacctgattgttgacggccacggccctgaccggagtgcgtttcttgtccggattctccgcattggttgctactcacggtatccacgttacctggggtctggtctggattattattatgataatccagtaacccgccgcgggttaactgatgtca

SEQ ID NO: 4041 - DNA, 735 bp, Photorhabdus luminescens
cgaatctctgcgggtgcattgtcaccgacatacaacgctttgcgacccagcgcctgttcgatacgtgcagctaactccaccggtgttattggctgttcaaattccccatgcggcacgaatggctcaaccaacccgaccactttcgcattaatcagacgggccaattgcacgttatttcccaatgatggatgggcatcaaggggcagatgataaccatataaattgatatcattacagagcagcgttttcaggcgattacgtttcataccacgaatcactgccggctcatttttccagaaatagccatgatggacgataacagcatcagcctgaaggcgaaccgcttcatccaataaagcctgacaagcggtcacaccagtaacaattcgctgaatatgagcacgcccctcaacttgtaaaccattgggggcataatcctgaaaatcaccaacattcagctcttggttaatgacattttccagctcaatattacgcatcatatttgtcctgtgtattgattgtatgacaataatataccgttacctgccgccaattgtcagttgtcagctacttttgattgccaaaacctgctctgactgttttaaccatacgggcttatcgctggtttttacccatacacgatacaaataactgtaaaaacgggcgcgatcacgacgaaacaacataaccggaaacgccaggataccgaaagtgacagcgccaatacggcgtaaa

SEQ ID NO: 4042 - DNA, 655 bp, Photorhabdus luminescens
cggtgatccaatcaccgcccggttgacaaaagcttcgggtaacggcgcgtcaataggcggtctaaaagtgataacagaaaacggctggtttgctgctcgcccatcggggacagaagaagcctacaaaatttattgtgaaagcctgcttggccctgagcatcggcagaaaattgagcaggaagcactggatattgttaaccaggtttttgccgccggttgatctttttggccgattaaaaagaatccgcaacagtggtaacggcttttgcggattttttatttttcagcccagagcaaccattaatgcaccggcagtaatcagtgcaacaccacctgcggccatcagtgatattttttcaccaaataagataacggcgaagatgacggcaaacacgacactgagtttatcaattggggcaacctgagaaacatgaccgtttttaattgctagaaagtaaaacagccatgacaatgcccccgccacaccgcttaaaacgataaaaagcaatgccttgcggtttgccactatttcactcaccagatttaactttccctgtacgacaacaacgccgacaagaaacaacgccataatgactgcgcgtattgctgttgctgtattggcatcaagattttgcaacccgattttcccgaagaa

SEQ ID NO: 4043 - DNA, 746 bp, Photorhabdus luminescens
  misc_feature (569)..(569): n is a, c, g, or t
agtacgagcgagtgactgactacttttactatcattggtataagaaccgctgaaatagctttggtaattattgctaccatcacggctatatgatgattcgctgactttaccttttacctcaatatcattacccaagagatcaatatttccaccgcgtagatgtgctgcttctaaattgagattaccgtgggaatcaacaataatctcatcactggcagtaagagtaccttgtaaattaacgccactgccttttgcggtattgagtagacggatacgcccggcttgcatactaccgagataatagctatccagcacaccggttaacgcttgctgagaatcaatgacttctcctgtggctgagattttattttcaccactgatcgcattaatctctttttgagcagtgactgagccccggttgtcaattttaggtgcgataagatcaaggatcgcattggcgattaaaccatccgatttaattttcaggctattctgattattaaacgtactgaaaccttgcaaattaccttgttctatcaatggattacccacaaccagagaagcgcggntagtattgataaaaccacatccattacaggtgataccgttcgggtttgccagtacataatctgctgcgataccaaacacttcctgttgacctaataacagggaagggttcctgctgataacttcattcagaatcaggttagccgcttgaccattcaattaaggttagcggcaagctg

SEQ ID NO: 4044 - DNA, 668 bp, Photorhabdus luminescens
  misc_feature (534)..(534): n is a, c, g, or t
tcgttgatagaatgattgttgagcttgataaaacactcagcactcaagttgatgaaattatgcatgccaaagagttccaagagctggaatcatcatggcgttcactgaaattgctggttgatcgtaccgattttcgtgaaaacatcaaaatcaacatcatccatgcgaccaaagaagagttactggaagatttcgaattttcaccagaaatcatccaatcaggcttatacaaacatgtctactcaacaggttatggccagtttggcggcgaaccggttgcggcggtcatcggtaactatgcgtttagcaatagctcacccgatatcaaactgatgcaatatgtcagcgcggttggcgcaatggctcacgcgccattcctctcttccgttgcacctgatttctttggtatcagtagctttaccgaattaccagcgattaaagatctgaaatctgtcttcgaaggcccggcacacaccaaatggcgtgcgctgcgcgaatcggaagattcacgttatctcggtctgacaacaccgngcttcttgttacgtctaccttactccaacgtcgaaaacccaattaaaaactttaactatcaggaagatgtcagcaaagatcacgaacattttctgtggggtaataccgcttatctgctggcaacttgtttgact

SEQ ID NO: 4045 - DNA, 739 bp, Photorhabdus luminescens
  misc_feature (75)..(75): n is a, c, g, or t
  misc_feature (113)..(113): n is a, c, g, or t
  misc_feature (178)..(178): n is a, c, g, or t
  misc_feature (329)..(329): n is a, c, g, or t
  misc_feature (431)..(431): n is a, c, g, or t
  misc_feature (447)..(447): n is a, c, g, or t
  misc_feature (474)..(474): n is a, c, g, or t
  misc_feature (563)..(563): n is a, c, g, or t
  misc_feature (576)..(576): n is a, c, g, or t
tatccatccacaccggctgcgcactttggttttcggtcagcgcccagacaatggcattgagcgggcggtaacggngcaagcgacgcagggccatcaattgagcggtattcggntccgcttgcaaactgccgccccagagcaacagcgtgcgataaccctcctgccagtgcgtcgtggncagccccggcgcgatggcttccacctgttccacttcgcccaccaccagtaaaatgcggactttataccaccagaaccgcccgtaacggaggcgcatgcgatcgcccaaatcaccataatcatacggttcgctggctggcaaaagtggccgngtatcggacttcacatcggtgactttgtttttgacaaacaacgttaccgtgataaaacctagcatactcaccaccacagtgagcacccaagctattccacanacccacaacagatggntgaaagtttcggcatcagtggttcggngttctccccaaacccaccatcccagaccagccaacgaaaccagcagggtaatggtgcctatcagtaagataagtgtcttcaccaccganataggcggtattntattctcttgcagtgccataagattttactattccaaacgctaaagtatgttgaggatcactgactaaccacccacagggttggccggtattttccgccgagatcgccgtcagtgtttgcactacgatcgcctacatcccgccaatattgccccaagtgagaa

SEQ ID NO: 4046 - DNA, 658 bp, Photorhabdus luminescens
  misc_feature (57)..(57): n is a, c, g, or t
  misc_feature (160)..(160): n is a, c, g, or t
ggggctggaaccagaaagtcgtctgagttgtcaggctaaagtttctgacgaagattnggtggtagaaattccaaaatacaccattaaccatgcccgtgagcactgattggcaggagaaaaataaatgagcctgaaatggtctaacagccgtgaaatcggngaagcgctatatgacaaatttccagaggtagatccaaaaaccgttcgctttactgatatgcatcagtggatttgcgagctggacgattttgatgatgtagctgagaaatccaatgaaaagattttagaatcgattctgctcgttgggttggatgagtttgaataacaaatagcattaatttgttatttatctgtcatcgttttaagttaggctgctcttcaatgaaaaactggctttggccggtttttttgtagggtgaatatctggcaggcgaagaattatgtaggtaatacccaatggatttcaagatggatcgcgacggcaagggaacgaatccccgggagcataggtaacgatgtggccggagtgagcgagtgcagccaacaaagaggcaacttgaaagataacgggtatagaagctcgaataagctcctcactgccatcaagcggtaataataagaggtgagaatagaatgactaaacaaatcatgccaataa

SEQ ID NO: 4047 - DNA, 656 bp, Photorhabdus luminescens
  misc_feature (265)..(265): n is a, c, g, or t
  misc_feature (274)..(274): n is a, c, g, or t
tcagaaattcccacaacattggggatttgactttgatgctatcgaaagtgtacttgagcgtaatcaaaatcattcaggcagacttagaggggcttcaacgatttctcagcaaacggccaaaaatttatttttgtgggacggacgtagttggttaagaaaagggttggaagccgggatgacctttgctattgaactgggatggtcaaaaagtagaattctgactgtttaccttaacatagcagaatttggtgatggcatttttggngttgaagangcatctaaacactattttcataaatcagccagtaaattgacggcttcagaagcggctttacttgctgctgtattgcctaatccacaccgttataaaggaaactcaccttctgcttatgccttacagggttcgcattgcattctgcacacatgcttgtgttggtccgggatattatctttgacaaactggttgattaatatgatggcagccgaactacaacccgccctatcctcgtacatactcaagcggtaaactcccgctcctaatctctgcggccatcccctcatgtcgagacctctgtcctcgtcattcatgcgtcccttctcgtcccctgaggaatccgcgccactcctcattctcgctatttgatcaataagctcac

SEQ ID NO: 4048 - DNA, 815 bp, Photorhabdus luminescens
cttaacggcacggtcccggggcacctctagagtccacctgcaggcatgcaagcttcaaaaaaagccctcgcccaataacgggcggggtgagtagtagaataacttattgtaactgagccagtaataatggccagcgtgcttcaaattcctgcgttggacgatagtggaactcagagcgtacaaaacgtgaaagcatcccttcacaaaatgcgagtaactgagatgctaataacgactcatcataactgaaaccttgtccatcacgtaattttttctcttttaaaacttggcggatctgtacttcaattcgttcaaataactgatttatgcgcccttgcagccggttttgttcaaacattagagcatgacctgtcatgatgcgggtcagaccgggatttttttctgaaaaacccaagatcaggaccaatatcaggcgaatacgagttatggtatctttttcatcttgcagaatcaggttaatccgtgaaattaatgagtcttcaatgaactcgatcaagctgtcaaacatccgggttttactaggaaaatgccgatatagggcagcttcggaaacacccacgttggcggccagtttagcagtagtgatgcgatggctaccgtcactggattgcaacatatgcgccagcgcctgcaagatctcctcgcgtctggttcttttctttgcattttcgttttctgccatgtctgacaagacctttgttaagaacagcaaaacaaacacatcagtaattctttgctcaagggtattgtgagcaaagaatatgataatgggttatacccgtcatctttcaagt

SEQ ID NO: 4049 - DNA, 679 bp, Photorhabdus luminescens
ttgctaaagagcacagttatacaaaattctcaatggttcgctttggcaacgtccttggctcatccggttccgttgtccccctattcgaaaaacagataaaaagtggtggaccgataaccctcactcacaaagacattacccgttacttcatgacaatcccagaagcggctcaattagtcatccaggcaggagcactgggcaataatggcgacgtctttgttctggatatgggagaatcagtaaaaatttatgatctcgcccggaaaatgatccatctttccggcctgacagtgaaagatgaaaccaatcctcatggtgatatcgaaatcaaaattaccggattaagacccggtgaaaaactttatgaagaactcttaattggtgataacgtctctggcactaatcacccaagaatcatgacagccaacgaagcttttctgacctgggataaattacacccattattaaatgacttaaaaacatctcgcgataactacgattttgaaaatattaggcagatcctgattaatgctcctattgatttttatcctagagattatatctaccatgcttgaaaataatacttacaaatacactcatgtgatgacactggcctgaaaccatattaccgaccttagccttgtagacaactataatgctatgactttctaaccacgag

SEQ ID NO: 4050 - DNA, 760 bp, Photorhabdus luminescens
  misc_feature (745)..(745): n is a, c, g, or t
  misc_feature (760)..(760): n is a, c, g, or t
taggacaatctgaacgctcaacaacatcagaccaagggagtgatgcattaatgccatacttttccacagtcagaacatcactatcgggataaatatcgctgaatgtattattcacaaacttattattagcgatactattacaatcagagccctgtatcagcaccaatagattcttaccacctctttgcttaagatagtaagttatttcactaccatcatgacggaaaaactgtttatgtgcatttgtatttgagtaagcaaaacctatataacatgaaaaaagcagagcaaatgtcaaaattctctgtcgtaaattaaaataatatgctttcattaatctctcctttaattgacatatacaaagaccacaaattgacgatattgttcctgtcagaaaaaattttaaaatttaaaaacaaggttcagaggtttttatccaaagtgctaactaaaacacccatacctttggagagaagaaatggcaaccactttatccacagaaattacattacccgataattatcatacccacgattttttcgctcttcatcaaagggataaacaaaatatcgctgaaattgtgggacagaataaagttccaaaagggatgatgtgggatgaacaacctgcgggattaaccatagcgattaatgccaaaaccgcacatatacaacttaagattgatggtgacacaacaggccctgatgagcgcttatctactttagcatcacatatgccagggccnctacagcctgttcan

SEQ ID NO: 4051 - DNA, 660 bp, Photorhabdus luminescens
ctctcatggggcgaatgatggtcagaaaggtatcggtctgattatgctggtgctaattggtgtagctccagcgggatttgtcgtaaacatgaatgctaatggttatgacattgcccgtacctacgatgccattactcacttgcagcaatattatcagcagcatggtgcagcgttatcccatgcaattgaactgacgccatcggtcgttgttgcggaagatgaaccggaagggcgattccattgtgatattacgcgtgctgtcgttgttcttgaccagacagaaagcctattaaaaggcattcagagctacagtgagctgaatgctgaacagcgtaacaatatgcgcccgatgttgatgtgtattgctgatacggctgagtctctggctaaactgccggacacccggtgcctgagacccccgtttcctgaataattgcggaaagactattacccaccgttgattttgcccagtctggatcatcattgccgcagcactggttctgtttttgggacactggtgggtggaaaccggttgagtcactatttgtgagagatctgtaaaaaaggattacctaccacagggtgttcaactcaatgactggtgctgttcaatcggtgtggcaagtataccggattgcagttcaactacactgttctttc

SEQ ID NO: 4052 - DNA, 754 bp, Photorhabdus luminescens
ctgaaactggaatatgaaatgcttctccctgaggagactcaaaccccattagccgtgcgcattctttcggtgttaaacgacgcgggcgattttcctggttatctggattatcaaaatcctgttccccaagctttttattccatccccggtcaataaggatttctgagccatctttatggtaacgcgcagaaagtgtgcgagtaacactatccttattgttgggatctataaggccaaatccaaagccatttcctttagcctgatgttttctggcataattatataaatatttccagagattaggggtaagaatatatttactgtcaacttctggttcaagtaaatccgcaagtgttggccgttctttcgggaaatatcgactaatatccctaagtgtaaatccttgatgaatattcagatctttccgaaaaccaactaacacaattcgttccctatgctgaggcaaaaaatattttccatcaataattttaggatcattcggccccatgatatcagcatcagcaacagcgtatcccagctcattcaatgtattcatgataatacggaatgttttccctttatcatgactttttaagttcttaacgttttccagaagaaaaatagcaggttttttagctgtaataattctggccacatcaaaaaaaagagttccctgtgtatcacactcaaacccatgagcacgaccaagggagttctttttcgaaacacctgctaatgaaaatggctgacatgg

SEQ ID NO: 4053 - DNA, 686 bp, Photorhabdus luminescens
  misc_feature (620)..(620): n is a, c, g, or t
ttcatccggttgctcataccggattaagtaaactgaaagacaagcaggaaattaaccgatggttgcacggtagattacctgtctggttacagccaaagattgatggtgtagcggtaacattggtttatcagaacgggaaacttgtttcattaatcagccggggcaatggtgccgaaggggtaaattggacagcaaaaagccgatatattcccgatattccgcagaatatagaaaatgctccacctgatttggtattgcaaggagaactctttctgcataaagaggagcatagacagcaattattggggagtgatggcgctcgtaatcgggttgcgggtttgatgatgcgtaaggaccattcgtcagaattaaaacaaataggtttgtttatctggagctggccggatggccctgcggagatggaaagtaaattgcgcaaactggcagatatggggtttccattggcgcttcgctacagtcataaaatagaggaaccagagcaggtgcagaaactgcggatgcactattttgaacaacccatgctttttgctacagacggtatcgtgctgaaacaggaaattgaacctaaaggaaaccagtggcggtctggatctaacagntgggctgtggcatggaaacaccctttacgccatcaggttacacaagtcagggaagttaattttact

SEQ ID NO: 4054 - DNA, 749 bp, Photorhabdus luminescens
  misc_feature (724)..(724): n is a, c, g, or t
aaagcaggttctccttcactaaacttgaaatcttttgacggtatccacttccctctctatcttgcaacgtaaaatatccagaaggtctatttaatttcattactacagaaggtaataatggaggaaaagttacaattcatttcgcaaaaccgggtctaaaggaagactttaatactttcacaaacaagatatttaataaaaaactcatatacctcaatggtcaaatagcagatcaaaaatactttaacgtcagttatggaaatgaatttatcaatgctcatgaaattgccactgtaacaatatcacttaaaaattaattttactctttgtggtacgatatcgaataaggtaacgcaccatcaagtcgttatttcatcatgatagactatagaaccgacattccgcactgaattcgtaatttgttgttttaattaagaattaacaagcatatgaattttatacaaacaatttgaaatcagtatattacagatatagctgcggaatgacagttttatacttatatagcatatttagacatgaattaataaaactgaaaaagatcgagctattgcttcacaaaacagtcatcagaaatactctgctttgttatattcaatcactgcttaaaatggtcaaaatgtttataaaaaacaattatatgctcataaaaacacattaatattataaatatttagcgagttacacatcatttctttaatatcanacaaaacaaacaacaccttaatatt

SEQ ID NO: 4055 - DNA, 663 bp, Photorhabdus luminescens
ctaattcggtgcactcacgggagagtatattcgctgctctcctcccttcttaattctccataatttttactctcttcattattctttgatttttatatgtttttaatttctggcacaccctttgctatttccttattgaaaacataatagcaggatggaagggggatatatgaagctcattacgacaattataaaaccattcaaattggaggatattcgggaagttctttctggtcttggtgttcaggggttgaccataacagaggtaaaaggatttgggcgtcagagaggacatgcggagctgtatcgtggagctgaatatagtgtcaattttttacctaaaataaagatagatattgctgtagcagatgaattggttgaggaggtcattcatgctattcagcaatcagcttttactggaaaagttggcgacggtaaaatctttgtcattgaattacaacaggctattcgtattagaacaggagaaactaacgatgcggcactgtaactcactgatagagaagatagatatgaaaaggcaattctcagtggctgccagtgttgtggccagttgtgtaccatcattatctcaggctgcggaaggcgttgttgataaagccggatatgcttttatgatgatttcgacagcgcttgctctgctat

SEQ ID NO: 4056 - DNA, 725 bp, Photorhabdus luminescens
  misc_feature (725)..(725): n is a, c, g, or t
ttcacgacttaccacatgcacccgaatatcttcatgttcaccagataatccatgaataccggtcgctgtcgtggcatccacttcccccaccatcacagagatacgttccgttgttcctccgggactggagagataactcaacacgggtctgcaacgtttaacttcgattccggcctcttccattgtttcgcggcgcaccacctgttcgacatcttcgccctcttcaatcataccggcaacaatttccagtaaccatggcgtcgctttcgtctctattgccggaatacgtatctgctctatcaatacaacctcatcacgacgtggatcataaggtaacaatgcaccggcatggccccgctcaaaaacttcacggctaacctcttcactccaaccaccggcaaacagacgatgacggaaacggtaatttgtcagtttaaagaatccattgtacaaactttttttcgcgataatttctatatcctgcttatccaacatgactggcgttaacggcttcttatgcataaaattctcctaaatagttccttacttgctagccactaagatgatattaatcaagcagagttaaaaaattcactcgttgatggtgtaaagttaagctaaattaaggccatatggcacaaacggctacctttcgctgatagcatactctgctagaatcagtaacattttcgttttcaccaaggcaacgtaagagtctatcccan

SEQ ID NO: 4057 - DNA, 647 bp, Photorhabdus luminescens
taatgaaaacttttacagctaagccagaaaccgtaaaacgcgactggtatgttgttgacgcagatggcaaaactttaggccgtcttgcaactgaagtggctcgccgtctgcgcggcaagcataaagcggaatacactccgcatgttgataccggtgattacatcatcatcgttaatgcagaaaaagttgcagtcaccggcaacaagcgttctgataaaatctactatcaccacaccggtcatatcggtggtattaagcaagcgacctttgaagagatgattgcccgccgtcctgagcgtgtaattgaaatcgcggttaaaggcatgctgccaaaagggccactgggccgtgcaatgtaccgtaaactgaaagtttatgcaggtagcgagcacaaccatgcggcacagcaaccgcaagttctggacatttaatcgggattataggcaatggctgaaaatcaatactacggcactggtcgccgcaaaagctcttccgcacgtgtctttattaagccaggtagcggtaatatcgtcatcaacaaacgcagtcttgaagtttacttcggtcgtgaaacagcgcgcatggtgtgtcgtcagccgctggagttggttgatatgttgggtaaacttgatctgtacatcactgtt

SEQ ID NO: 4058 - DNA, 753 bp, Photorhabdus luminescens
  misc_feature (653)..(653): n is a, c, g, or t
  misc_feature (753)..(753): n is a, c, g, or t
tgtccaacaaaaagtgagcgacctgattcgcttgagcgttcacttgccgataagtgagatgaagctcgccgtcaataaccgctgtttgttccgggctccgttccgcctgttcttcgaacaattgatgaatgcacttatcaaccggataagactgccagttgtcattaatatcgaccaacagatattgtctttcctgctcagttaacaccggcagtttcgtcaaaggagccgtttgatattgctcactcactaatgcagacagtaaagtcaggaaccgttggctgaatcgggttattgtcgaccgttcgaacagttcacagttgtattcaaaactaaaatcaagaccgttctcactttcaccggcatctaaggtcaaatcgaactgggccgtgacatgttcgctatcaagggactcaaattcaacgtcgctcaattgcaatacctgagattcattggtatccatcgagaatacgatttggaatagcggcgaataacttgtactccgctccggctgcattttttcaaccaacaattcaaacggcagtaactgatgcgcttgagcatcaatattgacctgacgaatatacgatagatattcagcaaaagtgagatcggcttggtattgggtgcgcagcacgagcatattgacgaanaagccgataagcggctcaacttccgcctggcaacgattcgcaaccggcgtcccgatgacaatatccgggctttgtccatgacgggcaagtaacagggtan

SEQ ID NO: 4059 - DNA, 676 bp, Photorhabdus luminescens
  misc_feature (650)..(650): n is a, c, g, or t
gagcatgttgaacacatcacgcctgatatgttggatatggtgactttgagtgaaaaagagatcgcagttatttgccagcaagttgagggtggtgccggtaacatacaagatatttatccattatcacctttgcaggaaggcattttctttcaccatcgaatgaatggagagcacgatccttatattattccgattctgataaagttttctgatgagcaaaagttgacagcttttctccatgcgcttgataagatcgtagagcgtcatgatgttttccgtacttctattcattggcaggatttaaccacatcggttcaagtggtccatcgaacagcttctattccccttcattggcaagcggttattccaggtctttcggcgttggaaactgtgcaacaggcggcctttgaacgccattatatgaagctggatcgcgctcctatgatgcaggcgattgtggcgaaagggacagagagtggtgaatgttttctactattaaagcaacatcacttactaagtgatcatatttctgtcttattgcaaattgaagaaatgcaagcgttgcttgaagatccaaatgtggtattgccaacaccggttcaataccgtgagtttgttgctcattcattaaggattaaccaatctgacanaggtgttgattactttaaagctaaat

SEQ ID NO: 4060 - DNA, 754 bp, Photorhabdus luminescens
  misc_feature (735)..(735): n is a, c, g, or t
ccccgatatagcgaatagaacagatacaactaatgtcctaaaacaaacagatattctttccattgataatttttatttcaccatacgttaattgttaagataatgaataacgtcttattttaattagcaatctagatgaaaataaaaaactttcttatttaagtgtgaataaagtctggttttttaaatacttaatagaataagtaactttttatatttaatgaaatacatcatttacgatcatgcaaaaacacaattgtaattatttatttacactaagtgtaactgtagtttgacatgaataagttaatcctttagcctgccttttcataacgatttcaatcagttcaaaaactaggggaaagcgtgaagaatcgtactcttggcagtatttttatcgtagcgggcacgacaattggcgcaggaatgctggcgatgccgctggcagcagccggtgtcggttttggaacaaccttcgtgatgttaatcactctttgggttttgatgagctataccgctttattgttggtggaagtttatcaatacagcccggccgatacgggcctgggaacgctggcaaaacgttatcttgggcgaggaggccaatggctcaccggtttcagtatgcttttcctcatgtatgctctgacaaccgcttatatcagtggtgcaggtgagttgctgtcaggcagcctctcttcatggctggataaacctattcctgtttcatacggngtgctgattttcactcttg

SEQ ID NO: 4061 - DNA, 670 bp, Photorhabdus luminescens
agagatcgcatctttgatatgatacgcttcctcatcattcacggcacaggcccgtatctcagtaaacgtccggtcatctcaccttgttcttcctccctggcccatgcacgctaccgcttccttatcttcacctggaaactgacaccatgagccgtagccgatataccccggagcaaaaacacaacatgtgacccaatggtgccacagtgacctgactcgaaaacagtattgcgaacagcatcagctgagtttttcctttttacgtgatgaaatcagtgagtgactggaataccgtccggccacgtttatcgtccggcgctatatcagcccgcagtacagctgcgcgcgctgtcagtgtgtgcatgctaaagcccagcccgcccggctgattgaataggttgcattttggattaaataacgtttcgtaattatgctacacatagccttcttcaacccattgttatacatagaattatgagtggtataagatgtagcactattttgaaatcttatttaatatcatgtctattatttaagggaatacgaacatgtttacttccagattaacgatgttgcacttattatgtgaattcaaggtttttaataatttcaattttacattaatataaagaaaataaaatatggcgtgatttaacatttatacataatg

SEQ ID NO: 4062 - DNA, 739 bp, Photorhabdus luminescens
gggctggaaccagaaagtcgtctgagttgtcaggctaaagtttctgacgaagatttggtggtagaaattccaaaatacaccattaaccatgcccgtgagcactgattggcaggagaaaaataaatgagcctgaaatggtctaacagccgtgaaatcggtgaagcgctatatgacaaatttccagaggtagatccaaaaaccgttcgctttactgatatgcatcagtggatttgcgagctggacgattttgatgatgtagctgagaaatccaatgaaaagattttagaatcgattctgctcgtttggttggatgagtttgaataacaaatagcattaatttgttatttatctgtcatcgttttaagttaggctgctcttcaatgaaaaactggctttggccggtttttttgtagggtgaatatctggcaggcgaagaattatgtaggtaatacccaatggatttcaagatggatcgcgacggcaagggaacgaatccccgggagcataggtaacgatgtggccggggtgagcgagtgcagccaacaaagaggcaacttgaaagataacgggtatagaagcttgaataagctcctcactgccatcaagcggtaataataagaggtgagaaaagaatgactaaacaaatcatgccaataacactgtcttatgaaccagcagcagcttgctggggtgaaaaagcgctgattagttccagtgagcaaggggtgatggttcacct

SEQ ID NO: 4063 - DNA, 664 bp, Photorhabdus luminescens
tatccatccacaccggctgcgcactttggttttcggtcagcgcccagacaatggcattgagcgggcggtaacggcgcaagcgacgcagggccatcaattgagcggtattcggttccgcttgcaaactgccgccccagagcaacagcgtgcgataaccctcctgccagtgcgtcgtggtcagccccggcgcgatggcttccacctgttccacttcgcccaccaccagtaaaatgcggactttataccaccagaaccgcccgtaacggaggcgcatgcgatcgcccaaatcaccataatcatacggttcgctggctggcaaaagtggccgggtatcggacttcacatcggtgactttgtttttgacaaacaacgttaccgtgataaaacctagcatactcaccaccacagtgagcacccaagctattccacaaacccacaacagatggttgaaagtttcggcatcagtggttcggtgttctccccaaacccaccatcccagaccagccaacgaaaccagcagggtaatggtgcctatcagtaagataagtgtcttcaccaccgaaataggcggtattttattctcttgcagtgccataagattttactattccaaacgctaaagtatgttgaggatcacgggctaaccaccacagggttggccggt

SEQ ID NO: 4064 - DNA, 745 bp, Photorhabdus luminescens
tggtcaacgcaatgttgccagatgcagtacagagaggatagtttgaagcgcaattttttgctgtcaaatcatgtgggattacaggagtagggattaatgtctaataacctggcttatcactatttgccggaagaggtccataagtggccgggattaccactttcgttaagtggtgaagaagtgatgccgttggattaccgagcgggtgacagtggttggttgatatatggccgtggcctggataaacaacgtattagtaattttcaacatcggcttggcgctgctattgtcatcgtttcttcatggcgtattgatgattatcaggtagtacgtattgccggaaatttgactgctcgtattaaacggctagctgatgagtgtcggttagatgtggttcccttggggcagatcccacggttgcggtcaccaggtttgctggtgatggatatggattcaacagcaattcaaattgaatgtattgatgaaattgcccgtttggctggcgtaggtgacaaagtggccgaaattactgagcgggcaatgcaaggagagttggatttttctgatagtctgcgagagcgagttgctcagttggcaggggctgatgctgatattctgcgacaggttgtagaaaatttaccacttatgccggggctgaccagtctggtgcgtaagttacaatcctttgattggcatgtggccatcgcatcgggtggttttacctattttgctgaccatttacgcc

SEQ ID NO: 4065 - DNA, 668 bp, Photorhabdus luminescens
tttctcgctgcgttgaaaacaagagagctggttaccgacctgtaatactgacgctggaaagtaaggtattggctgctcgtcaaatggctgaaaacgttggcatgtctgaccaaatctccgttcaagcagcagaaattttcattggtactaatattgaagaaattgctatctatgaaagtgatagaatacgcaagggagttgctcatttgatacgtacatataacgaacgtatctcaaatattgagatcgataaatcccttatgatcgatgagccaaagtggattgtgaaacttctttcaagagattgatggggatatctcttatttagggtaaatcaaaatttcgcataggaaggaaatctggtggcaataatacgcagattggttctgaaaaacttcaaacgatttaaaaatcttgaattagaattcgatcctgaattaaatattctggttggcggcaatgaagctggcaaaagttcggtgctccaggcaattgatatcgcgctcaacgccagtcgaagtaaggtagaatcgctcggtcttgaaacccttttcaatatggaatgtatctcggaattcctgaaaggtgagagaaaaatcgtcgaactacctgagctgctgatagaggtatacctagatgggattgaaggtcaccacgaactagatggc

SEQ ID NO: 4066 - DNA, 747 bp, Photorhabdus luminescens
  misc_feature (557)..(557): n is a, c, g, or t
  misc_feature (747)..(747): n is a, c, g, or t
attgatcgcatccggggttcggtcaaaaagcagcttttcatcgctactcatagtagtttgattgcaactcggttgaacctcaagaaagtactaatattgagcgaagaaaacttgtcccaaccaacttctctcaaagatctcagtcagagcacagccaatttcttcatgaaggctcccgacaacaatgtgctggaacttgcgttgtgtaagaaggctatccttgtggagggagatgctgagtttatcctcatggatgccctctataaaaactgcactggaggtgcaagtactgataccgatggtatctatgtaatctctgtcgatggaacaagtttcaagcgttatcttgagctagccaagttgcttggcatcaaggttgcggctatccgtgacaatgacggggactacaaaagcaattgtgttactaactatgctgacctcatttcagattctgtgcagattttcgcagacgctgacgatgctcggtacactttcgaggtttgcatataccaagataatacgaccatttgtgaaggtcagttcgcagcaggtcgaanaaagcttaccgtagaagaatatatgttaaaaaacaagacggaagctgcattcgaattgctcgaacaaaagggaaccgaacttgtcgcgccaaattacattcagcaggcaatcacatggataagagagtagtatttgccgttgccggatcgggtaagacatcccgtcttgttgccagccttgatgaggagn

SEQ ID NO: 4067 - DNA, 672 bp, Photorhabdus luminescens
  misc_feature (532)..(532): n is a, c, g, or t
  misc_feature (669)..(669): n is a, c, g, or t
atgaaattctgacggatgaccagaaacgggctgcttatgatcaatatggtcatgctgcttttgaacaaggcggcatgggcggcggcggagctgattttagcgatatctttggtgacgttttcggtgatattttcggtggtggtcgtcgtcaacagcgtccaagccgcggtgctgatttgcgttacagcatggagttgacgctggaagaagcggttcgtggtgtgaccaaagagatccgtatcccgacactggaaacttgtgatatctgtcatggtagcggcgctaaagcaggaaccagccctgtaacctgttcaacctgtcaaggtgctggtcaggttcatatgcgtcagggatttttcaccgttcagcaaccttgcccacactgtcatggccgtggtcagattatcaaagattcttgccataaatgtcatggtcatgggcgagttgaaagatacaaaaccctgtctgtcaaaatcccggcgggtgtggataccggtgaccgtgttcgtttgagtggtgagggtgaagcggnggctaaaggcgcacccgcaggtgatttgtatgttcaggtacaggtgaaatcacaccatattttttgagcgtcaagaaagtaatctctattgtgaagtgccggttaactttgcaatggcggcactgggtggagaaatnaaa

SEQ ID NO: 4068 - DNA, 772 bp, Photorhabdus luminescens
  misc_feature (691)..(691): n is a, c, g, or t
cgatggatgaactaaaagaagctgctgagtctttgaaaaaagcataccaaaatgaacctgatgcagggagcatgaaagcatcagaaataaatgaggtggcacaaaagccggcagcgtctcaggttgtggcttcatctggaccttctgctctagtggatgatcaagcggcttctgcaacgaagaaaaaaacttccgattaagttaatggtgaacactaaaacatggctgttgatgatactcaaccacttatcagtcaccttattgaactgcgtaagcgaattctaaacagtttacttactgtattagtggtttttttagcgttggtttatttttctaacgacatctatcagatgatttctgcacctttgattaagcagttgcctcaaggtgccagtatgatagcgacagatgttgcttcccccttttttacgccaataaaactgaccattatggtgtcaatattcgtatctgcacctatggttctctatcaagtgtgggcatttattgcacctgcgttatataagcatgaacgccgcttgatgatccctctgcttgtttccagtagcctgctattttatttggggatggcgtttgcttattttgttgtatttccgatagcttttggattctttgctaaaacggcacctgaaggagtgctgattgcaacggatatcagtaactacttaagctntgtcatggcactgtttatggcctttggtgtctcttttgaagtacccgttgccattattttattatgttggagtggggtagt

SEQ ID NO: 4069 - DNA, 692 bp, Photorhabdus luminescens
  misc_feature (690)..(690): n is a, c, g, or t
cttaaattctggtgataatggttgttatcaccagatatttcagacatagctgaagaagataccaagaaatagcaccagaccaacgtagttattattgaggaatgcctgaaaacaaagctctctttcccgaccagcgatcagtttctgctgataaataaataaagtgcccgtaagcaacagtgaccagtagtagataccgcccagatttatcagataccccaccagcaccagcagcaatagcatagcgagttgcaataacccaataatcaacttgtcgaaacgaccaaacagaatggcggtagacttcacgccaatttttagatcatcatttcgatcaaccatcgcatactgtgtatcataaataaccgaccaaaagatattaaccagaaataacaaccaacactctagtggtaaggactcactaactgccgcaaatcccatcggaatagcccaaccgtaagcggcccccagtacaaactgaggaaaatggctaaaccgtttaacaaaggggtaaagccaagccagagccaacccaacggctgacagccagatagccattttattcagggttaaaaccagaccaaaagaaatcagcgccagtacgacaaataggatcttgctctctttctcactaatagcaccactcggcaggggacgtgtttttgtacgttcacataaccatcaaatttntg

SEQ ID NO: 4070 - DNA, 759 bp, Photorhabdus luminescens
  misc_feature (759)..(759): n is a, c, g, or t
tacttttaggataaggctcaatatagacaactcgccgtataccgctagcaacgatatgttttgcacagttatgacaaggaaatgtagtacagtataatatcccattatgagtactaatgttacttcttgcacacgccaagattgcttccatttcagcatgtacaaccctgccatattcggtaatatcctttatcttgctatttaggagacatcctctaaacttttctttttgttcctcttcaatatcttcaagtatatcttcaataattaatcttttctctttagcgtttgaatcttcacctactttataatctctaccattttcagcatcttcaattgaatctcctacataatcaggccaatataatcctccgccaaatcgtggcacatcattagctccagttgagattatattcttatctttggttaataccgcaccaacctgacgggaaagatctgctgatcgcagagaagcagaaaaagccatgaacatagcgtattcatcaaaggttggcgtgacatatgggttaccaaaaatcagatctaatattctccatatattattgtcggtcctatttttatttccatcataatttataaagaaatctgataactcataagtatctcgattacgctgcccccacttattcccttcattggaatcacgattaatcaattctctggcttttacttcatcaatacatttatcaacgataagatttcttaatctctgagattcactcgtatatacacctatcn

SEQ ID NO: 4071 - DNA, 679 bp, Photorhabdus luminescens
  misc_feature (667)..(667): n is a, c, g, or t
cacacataactagcctgaaacttctttttaacacaagtagttgcgatttgtagtaaggatttacccctggcgaagagatccgctgttggcacgtagcggatgttggcaattgtaatcaccgtcaaggtggacattactggtattggtgtgtgttaatctacgggaagcaggtcaatagatcgcctttaccattactctgatttactatcatcagagaatgagtcctttattagaaaagcgattggatgggcacttaaagactatgcccgatggaatccagaatggataaaaaatgttatttcaaagaagaaggatgaattttcaggcttaaccattcgttaagcatccaaacatctaaaataaaaaagcacccggaggtgcttttttatttcccaaacattccaccattttcatcaaacatctccaacagttcatgaagtctcatgacttcatcaagaataggttgaacattatgtctttcccccaatacttgataaattccatcatttagatagtaggctctgaagatgtgatgcggcacatctgtttcttctggcttggtcaagattagacttgggaagatatttcctacaattccaccttcaagatacatatccagtcgttcatcaaagtgctctattgcatttctaagtttcttataatgcanagggctgctttc

SEQ ID NO: 4072 - DNA, 773 bp, Photorhabdus luminescens
caacggcagtgggcatcactgtgcaattgaagaagtttagtggaacagaatggtccccagatttaaaggacgatgaaccgtttcatctggctaataaaggcacaatcgtaaacgataaaacgcctactgtgccggtgaaattttcactggtatgtgctttggcaggcgggcagacggtagcggtctgcaaaaaggcaggaaaaatcaaggctacactgacgtttacgtttaattatcgttgatgtatcggcattgcagcgtggtatcgcgttaacagaagagtgatagggttaatttgaggtgagcacgatgtttgggacagcgacagaacaaaaaaaaagcaggctgaatgacccgtcgaccttcctgcccaagggtagaaacccggtattgcaggttgtgatgcgctgcttctgctggagttctgtaatggttctgctgttcctggcaagcagcgtcatggctgatgaccccaatcccaagcccaagaccgggcccaagtacccaccgacgatcacgagtgggatagacgtacaggtgaatgtaactgtttatcctgatccttgtgacatagagatcgatggtgatgatattaatggttcggagctgaattttggttccctgctggcggcggagtttagtcatgaaggggatgtatcagccaccaagtcatttaagttgaaattaacgaattgtggcgatccggatagtgtgggctttgtccccaagctcactgcatctggaaataccatcgacgctgaacaagggtcata

SEQ ID NO: 4073 - DNA, 695 bp, Photorhabdus luminescens
cgcttctatggcaatcattcttgtttcttgttctaccagttttgccagtgaaatcgttggtggtggcgacccagcacaccatcccgatattttcgctgccgaaggtaaagcaacggttgtgaatatcgtgacgccctcctcttccgggctgtcacataaccaatatctggattacaacgttggccagatgggcgtcgtcctaaataatgggctagaggaaggtcaatcacaattggcggggcagcttgccgctaaccctaatttgaatggtcaagcggctaacctgattctgaatgaagttatcagcaggaacccttccctgttattaggtcaacaggaagtgtttggtatcgcagcagattatgtactggcaaacccgaacggtatcacctgtaatggatgtggttttatcaatactaaccgcgcttctctggttgtgggtaatccattgatagaacaaggtaatttgcaaggtttcagtacgtttaataatcagaatagcctgaaaattaaatcggatggtttaatcgccaatgcgatccttgatcttatcgcacctaaaattgacaaccggggctcagtcactgctcaaaaagagattaatgcgatcagtggggaaaataaaatctcagccacaggagaagtcattgatttttcagcaagcgttaaccggggtgctggatagctattatctc

SEQ ID NO: 4074 - DNA, 762 bp, Photorhabdus luminescens
aattgataccgctttgagacgccaaaccatcaatcccgcaggaaatatgattaatgctggcactaaagccaaacccgccaaagcgccttcatacccaccaagaacaaaacagagataataggccatcacgccaatcacgctaccaaaaataatcgccagcgcattcctctgtgcatctcggtatcctttcaaaatagccaaaaaatagttggcaaaagcaatccccatttgaataaaggcgagtgcctgcacaactgactcataatcttgatggccgaataatcccgtactgatagacccgctaaacagcaaaaaaatcaccgccaacagcgtggaaaacccaaggataatggcagaagatgttcccaataccgcacgcaatctttctggctgctgctgatactcagcaacatatttcgtcacaccattaaaaataccggcaccagccaataccccaagcacagtaataagctgacggaaattacccgcctgcccaaccccgctggggccaaaagcaaccgccagtaatttaacgattaaaagccctacaccgatttttatcagtgtagagcccgcagtccatattgatgctttagccaacgacatatcaggcgaaggattcccgaatatggttgatgacaatctgctgttcagcgtctggtatgtgtgaaaacatcgggcagcgcactagacgatcactttcacaagtagtaaaacatcttccccatgaaaacggtcaattttttaacacccgggctgggg

SEQ ID NO: 4075 - DNA, 696 bp, Photorhabdus luminescens
ttactgcaacaatacttactcggccttcggcaaagttaacgacttgtaaggcgccaggatattgaattagtttataaatataatctataacaagttgttctggtgaaataagataatcaataggaatatcattgggcagaaaaagtttatctgcttcacgaatatattctgctgcgcgtattcgcgcaactttatttggggtgttaaataaggaataagcaatttgacatgcgatcatgttagtttcgtcagaattagttacagcaactaacatatcagcatcttcagcaccagcttctcttaatactctggggtaagaaccatgaccattgactactctgagatcgaatttatcctgtagttggtgtagacggttgggatcagtatcgactatggtgatatcgttattttcacctaccagattttcagctaatgtaccgccaacttgacctgcaccaagaataattattttcatagtattctctaacttattgcaaacaaataattatctctataaatcgtagagatatattaccgtttagttaatcgagcgtaaaagaaaccatcaccaccattttactcaggtattattttgttttcctagacaatcatttgtctctggtcccgcgagttttgcatctgagtggcgtgttaaaaacgagctgatttgctgacaattttcatcttggtagataa

SEQ ID NO: 4076 - DNA, 746 bp, Photorhabdus luminescens
cgtcacgcatcagtttgtggaagaaacggaaatacatcagatgcatgatggcatgttcgataccaccgatgtattggtcaactggcagccaatagttagccgctgctggatcgagcaggcccttgtcataatctgggcaggtgtagcgagcgtagtaccaggaagattccataaaggtatcgaaggtatcggtctcacgtagtgcgggctggccgttgatagtggtttttgcccactcaggatcagctttaattgggctggtgatgccatccattttgacatcttctggcagaataacaggcagttgatctgctggaaccggaacaactgtgccattttccagtgttgccattggaataggagcaccccagtagcgttgacgggaaacaccccagtcgcgcagacgatagttgactttacgcttacctacgcccatttccaccagtttattagcgatggcattaaaaccggcttcgtgattcagaccgctaaattcaccggaattaaacaggatattcttatctgttaccggtgcttcatggacgttcggttcattaccttcattgtccagaataacggcttttattggcaggttatattttgtcgcaaattcccagtcgcgttgatcgtggccaggcactgccatgactgcaccggtgccgtattccatcaggacgaagtttgcaacccagattgccactttctctttggtcaatgaatgaatagcaaacataaccggttgccag

SEQ ID NO: 4077 - DNA, 664 bp, Photorhabdus luminescens
taccttcgtcaaattcaccggcacgcattttttcgaacaacaccaagttttcttcaatagtgcggtcacgatatgggctatttttgcccggctcttttaacgtaccacgatattcacggatctcttctggactcaattgatcaacataagccagacctttgttgatcaattcaatagcatactgatacagcgtatcgaaataattagaagagtagcgaatatcaccgctccactcaaaacctaaccactgaacatcatttttaatagaatcgacgtattcaacatcttccttaactggattggtatcatcaaagcgcagattacactgcccctgatagtcctttgcaacaccgaagttcaaacagatagattttgcatgaccaatatgcagataaccattgggttcaggcgggaaacgagtatgtaccgatgtatgtttaccagttgccaaatcttcgtcaattatctgacgaataaagtttgtcgggcgggcgtctggctcactcattgttttatacctcaataatgccaaaaacgcgtcacataaccgcctataattcaacaagcagtgccgagaaacaaccatttgttccgtgtaaatggcgattcacgacaaagttggagcgaaaaacactcacagtagcacatgtcacaatacagctcg

SEQ ID NO: 4078 - DNA, 758 bp, Photorhabdus luminescens
tcaaccaacggcgtaaaactatccgtaacagcctcggtgatctttttactgtagaacagctcacagaacttggtatcgatccaagtactcgtgcagagaatatttctgttgaacagtactgtaaaatggcaaactggctatcagaacaacctgaaatgcagtcataacaggagtcaattatgattaatacgcccagggtttctattcaggtacaaagtgtttatgtagaaagccaatcgtgtcccgatcaacggcgtttcgtttttgcctatacaattactattcgaaatcttgggcgcgaacgggtccaattaattaatcgttactggctgattaccaacagcgacagccatcaaacggaagttcaaggggaaggtgttgttggtgagcaacccataatccagccaggtaccgaataccgttacaccagcggggcgatattggaaacgcccttgggtactatggaaggccattatgaaatgattgatcacaatggtgaaccatttcgcgttgctattccggttttccgtctggctatcccaacgctgattaattgattatgtctacatatctcattggtgatattcatggctgctaccgtgaattgcgtgctttattaactaaggctaattttgatcctacaaaggatacattatggttaacgggggatttagttgcccgaggcccagactctcttaaagttctccgatatgttaaacagttaggttcagccgcagaatggattaggcaatcacgac

SEQ ID NO: 4079 - DNA, 678 bp, Photorhabdus luminescens
tatcagccacaagatgcgacaactaacccatctctgatccttaacgctgcacagattcctgaataccgtaaactaattgatgaagcaattgcgtgggcgcgcgaacagagcgattcccgcgagcagcagattgtggatgctagtgataaactggcggtaaatattggcttggaaattctcaaactgatcccaggccgtatttcgacagaagttgatgcccgtttgtcttatgactccgaacgcagtgttgccaaagctaagcgcttgattaagctatataacgaggctggtatcagcaatgatcggattctgatcaaattggcttcaacttggcagggtatccgtgcggctgaacagctagaaaaagaagggattaactgtaacctgacactactgttttcctttgctcaggcgcgtgcttgtgcggaagccggggtttatctgatttcgccatttgttggccgtatccttgactggtataaagcgaacagcgatcagaaagagttcgctccacacgaagatccgggcgttatttctgtaactgaaatctaccaatactataaacaacatggctatgacaccgtggttatgggagcaagtttccgtaattcccgtgagatcttggaattggcgggttgcgaccggttgactattgcgcctgcgctgttgaaagagtgg

SEQ ID NO: 4080 - DNA, 741 bp, Photorhabdus luminescens
atgaggcttatggagaattgctccacaataagacattttgcgtgcgggtaaagcgccgaggtaaacatcaatttacttctaatgaagtagaacgctatgttggtggtggtttaaaccagcatattgaatctgcaaaagtaaaactcaatcatcctgatgtgactgttaatctggaaattgatcaagatgtgttgattctggtaaaagcccgctatgaggggattggtggttttcctatcggaacgcaggaagatgtattgtctctaatttcgggaggttttgattccggtgtttccagctatatgctaatgcgccgtggctgtcgtgttcactattgtttcttcaatcttggcggttctgctcatgaaattggtgtgaaacaggttgctcattatctttggaatcgttttggcagttcccataaagttcgtttcgttgctgtggattttgaacctgttgtcgctgaaattttggaaaaagttgatgatggtcaaatgggggtggtgcttaaacggatgatggtaagagcggcatctaaagttgcagagcgttatggcgtgcaggcgattgttaccggtgaggctttgggacaggtttccagccagacactcactaatttgcgcttgattgataatgcatcggatacgttgattctgcggccactgatttctcatgataaagaacacattatcaggttggcacgtgaaataggcactgaggattttgctcgtacaatgcctg

SEQ ID NO: 4081 - DNA, 659 bp, Photorhabdus luminescens
ggctttattaatcttctcccaagttactgtatcctcttcaccttcttcttcgctcttatttttggtttcaatttcaaccggcaaggcaatatggtcagagtatttactgataacagaacgcaaacgccagtcattcaggaattcatcttctccttcacgtaaatgaagggtgatctctgtaccacgggtttctttttcaatatcggcaatcgtgtaatcaccttcaccagcagattcccaaaatacgccctgatcaattgaagcgccggcagcacgagtacgtacagtgactttatcagacacaataaatgcagagtaaaacccaacaccaaactgaccaattaactggctgtctttagcctgatctgaaccaatagattccagaaaagcttttgttcctgatttagcgattgttccaagattatcgatgacttcatcacgagtcataccaatgccattatcactaatcgtgatgcatctcttctctttatcaaaagaaagacgaacgcgtagttcaccatcattttcataaagttttggaacagataatgcgcggaaacgtaatttgtcagcagcatcggaagcgtttgaattagctcacgaaggaaaatctctttattggaatagagtgaatggatcattaattgcaaaagctggtt

SEQ ID NO: 4082 - DNA, 747 bp, Photorhabdus luminescens
ttgccagaatggcattttttgccaagtttctggttgaggctgagattcaggaatatccccaaggttagaatgaacaggctctttttcaagtgcaaatgcaacccggctagcaatatccctatgcaatacttccgtcacatcaccgcgcaatgtgtcacggatcaagtggtaattttcccagtgtttctgcataacagaatctttagacaaaatactaacgacttcactatcaagagtttcgccatccatcagtgcggaaagtttttctctttgcatgccaaagtacccttcagtattgttccactatttttaattttaaatcagtggttgaatgttatcatcaatggcttcccttgcacggaagatgcgggaacgcaccgtacctaccgggcaattcataatggtagctatttcttcatagcttaacccatctaattccctcagcattattgctattcgcaaatcttcgggaagagattcaatggtacggaaaaccacctgcctcaattcttctgacaacattaaattctcagggttcgaaatttcttttaatgcactcgaaatttcataattttctgcgtcactggcatccaaatcactggatggcggacggcgcccttgagcggtcagataattcttcgcagtatttactgcaatacgatacaaccaagtataaaaagcactatcaccacgaaacgaagccaatgcccgataggccttaataaatgtttcctgagcaacgtcagg

SEQ ID NO: 4083 - DNA, 662 bp, Photorhabdus luminescens
acggtggtgaacttggggtcgggtacgccgcgcaacagtggttctcatccggtcacgtactcaaagatgtggataaatttacagctaattcgggtgtggatgataaatctgttgccgccgcgcgtcgttttcgtgaacagtggacagagataagccagagttttgagaaaacaggctacattctgtttaatgcccttttaccatatatcaatgatttcaatatctggctaaaaaacctagctgattggatgaataagcacccagaagagattaaaaaagcggtcagtggttttctcgataagatgagttttattatttcagtcgctaatcaggccgcagatgcggtaggcggttggggtaatgtcatcattggtctgatcgggttgaagtttgcggggtggttatggggaatttatcgcgtggcttcgtccatgctgaaaatggggaaaggcggcgggttaccgggaaaagggattgccgggaaagccggaatatatggcgctatcacatatgcgttatatgatcctgtggagtcagttgcgacttcgattgttggggaagagacaaaaaatacacttgattcatatggattgtatctggcaagcgactggacacccttttttagtaaaaaagagtatgaagcctatcaggcaaaactggat

SEQ ID NO: 4084 - DNA, 741 bp, Photorhabdus luminescens
tgacgcctttatatcatatatggaaaacagcaatgatatttgggctataaaagacaacgaacatcgattcatctatgccaatgatacaatgatttattacagcggccttcctaaaggttttaatatagaagggaggcttgatggtgagtgtccagcaccgtggtctgagtttgaaaatattatacaagctagttgtgatgttgtaatgacgagtcaaaaaaccattccagtattaaacaccttgacttatggtgggaaacaaaaaatgatccaaccatttatgctcaatgttacccccctaatgaaggatgggaaatgcattggggttgttggtcacggtaaaaaacttgaaatttattccatgtatcattttgaaaacaacattcagcctgactcattaacttttggcaaaccaactgatttatttactgatagagagttcgatatagtattttttgcattacaatcgctaagcgctaaagatattgccagaaaattaagtattacctatagaacggtacaaagcaggctacatatcatttatcagaaaatagggataaattcattaagccagttaaaagaatattgcacgggtaagggggcttaaaactaccctcctacccgatttattaacaccaatccctatataccttctacataacaatgaaccccaccgggtttgtccctatgcctattaagggtcctgttgggagaaacttacacttttgtctctccactccg

SEQ ID NO: 4085 - DNA, 666 bp, Photorhabdus luminescens
  misc_feature (269)..(269): n is a, c, g, or t
  misc_feature (286)..(286): n is a, c, g, or t
  misc_feature (296)..(296): n is a, c, g, or t
  misc_feature (305)..(305): n is a, c, g, or t
  misc_feature (332)..(332): n is a, c, g, or t
ctatgacacaacgagctggtcgggcaggacggttagaagccggtgtgtgttggcatctattcagccaagaacaggcagaaagagcggtagagcatagtgagcccgaaattctgaatgctgatctcagtagcttatggctctccttattgcagtgggggtgtcatgatatttctcaattgcactggctagatataccacctgcggcggctctggcggtggctaagtcgctgttattacagttaggtgcaatcagtaacagtggtcagttnacgtccagaggcagtanaatggcggantccggtagngatccgcgtctggcaacgatgttatgngcggggttggaacaaggggcccatatgctggcaaccggcgctattctgaccgcgattctggaggagcccgcccgtgatggtcaagccgacatcacttattgggttgagccgcgaccagcttattgggttccggcggtcaaagcagctacgctaaaatatgggggacccctttcggggagccagtcgttggattttgctgaaaggtctctagcccaaggtttcccttgacaaatagcgaaaaattccggataagcggagggctccttctacctccctcaccggcttggacaccgaatcgcggagtgatcacccgttttgtggccaattccgcttg

SEQ ID NO: 4086 - DNA, 760 bp, Photorhabdus luminescens
  misc_feature (752)..(752): n is a, c, g, or t
atcccatctggcattattggtatagatcgtttaggagtgaataacctgcactcaccccggtcatatagttatctatgctcccggggattcgcttccttaccgtcgcgatgcatcttgaaatctttagggtatatatgggccagcgctcacacgctgttgtctcgcttttatgcggattttgtcttctgagatggtgagtcgtgcgggatgactcggcctacggccttatccttcaagtcagcactatcagaaacacggcttgtaaatctgatggaccggaaaagaaatattattctgttatttaacaaaaaaacatattttcccacaatttatgatgatctttcatcatgataataccgtcaatttagtatgagcccctcatgttgatatttcgtactttagggggtagactaactacgttagttgaagagtaacgcgctaaaaccgaggctaccaacctggtgaatagcattaaagataaatcaccctacttaagggtaaatgcaaaaaaaccaacctcaccagttggtttttttgtttttatctattcacgttctaatccattgaatcaggacaaaataaacttataatcaacggctgttagtttagagatagtgttctgaccgtgtatctactacgcaagttttcttaagccctggctgaagtacaggtggtgctgattcagtgcctcagtcagagcgcgttactcttcaactaacactgatgagaacccagccagacaggcagtgtanaggcaatg

SEQ ID NO: 4087 - DNA, 683 bp, Photorhabdus luminescens
  misc_feature (672)..(672): n is a, c, g, or t
ttgaacgagtagatcgaggattaattaccagtacaaaagagagtcatactgctgccgaaaaatttgccagtgaaaccaataacagttatggcgtgatggcgcatatgcatttggctcaacttgctgttgaaaagaatgaattaactaaagcagatcagtttttatctgcggctaccggccaggtaaaaaatgaggatttgcaggctctggtgaatattcgcctagccagggttcaattggcggaagataaagcggatgctgcgctgaaaacattggaacaggtcaaaggttccggttgggttggcgttgcagaggatattcgcggtgatgcactggtgaaaaaaggtgatattgctggtgcccgcgcagcgtataccaaaggtttgagctcaaattcaccacaggcgatcaaatcgatgttaaatcttaaattgaataacttatccagctaaggggaattctttcaatgcaactgcgtaaaacactcttggttggtttggtggcttccgttctgctagccggttgttcaacggagcaagatacagtaacgatgtcaccattgccacaggtcgaaaatcaatttaatccaagcgaagtttgggataaatctgtcggtgatggtgtaggccgttattattctcacttgacgccaacctggcagggctccgctgnttatgttgctg

SEQ ID NO: 4088 - DNA, 764 bp, Photorhabdus luminescens
  misc_feature (517)..(517): n is a, c, g, or t
  misc_feature (592)..(593): n is a, c, g, or t
  misc_feature (725)..(726): n is a, c, g, or t
  misc_feature (732)..(733): n is a, c, g, or t
  misc_feature (735)..(736): n is a, c, g, or t
  misc_feature (740)..(740): n is a, c, g, or t
tttttagatatcttatcagatatgttttaaatatcaatatagcatcttgacaggtttttacaggaggtcattgatgacccgcgttcccgacaccgatttagtccacttaaagcaaaccgtctcgttactggggctggcgcgtaagcaaggccgtccgatgaaaaaacgcggtgaggattatgtgctgcgctgtccgttccataacgagaaaacgccctcaatggtgatatcgccggctaagaacctgtatcactgctttggctgtggcgcagcggggtcggtgctggactgggtgatacaaacggaaggggtgacgctgaaaatcgctatccgccggctgcgggagctggccgggttgccggatatggacaatgcagttgtggctgcttcttctttagccgccctgccggagtcacaggcggcccccctgccgcgcccgaaactggccgacctggacgatgacgggcaggcgctgttgcatcaggtgattgatttttatcatcagcacttacttggncgtcaccggaagccaaagcctggctggcacgacgcgggctgaatcaccctgaactggtcaatcactttaagctgnngtacgcgggccatcacggattcggcggttcagcgggcttattaccgtcaagagcagtcaggaaggccagcacctgcgcgacagctgtcgggctgggcccgggttccgtactaccaccccgcaggacacttcnnggctgnntnntggnggcccgggattccgttgggccaaa

SEQ ID NO: 4089 - DNA, 687 bp, Photorhabdus luminescens
  misc_feature (519)..(520): n is a, c, g, or t
  misc_feature (568)..(568): n is a, c, g, or t
ttattgatgaagttgtgccacatgaattagctcatctattagtttatcgctactttgggaaagtgcctccacatgggaaacagtggcgttggatgatggaagaagtactgaacgttccagctaaccgtacacacaaatttaaaatcgattcagtacgtagtcaaacttttacttattactgtaattgccagcaacatgaactaaccctacgacgccataataaaattctgcgaggagaaagtcattatatctgccaaaaatgcggagaaaaacttattgctaaatcaatagattctctcaatcctaatttatacccaatggatttcaagatgcatcgcggcggaaagggagtgaatccccgggagcataggtaactatgtgaccgcggtgagtgagtgcagccaacaaagaagcaacttggaaggataacgggtataaactcaaatcctgtaaggatacgtaattcaccgagaaaatcataaccagagatcaagattgtcattgttttatatgcactannataagaacttaatattgcaaagattatatttattggccggaaattagnaaaccccgccatttaattcagttatttttctttacatgcggccccaaaaatctgattcatgaatggccgggttttaccttttatacaccttctaaaacctttccaaaaggtaacctaaa

SEQ ID NO: 4090 - DNA, 767 bp, Photorhabdus luminescens
ttgtcgcggacaggcgcatttgctcaatatgttcgttcacggaagcatctttttcgataaaagtatcggaactcggcacataagcttccggctggtaataatcgtaataggaaacaaagtactctacggaattttctgggaaaaagtccttcatttcgctgtaaagttgagccgccagtgtcttgttcggagcaagtaccatcgttggtcggtttaaattagctatcacattagcgacagtaaatgtcttacccgaccccgtgacccctagcaaagtctggtgggcaagcccatcttctaagccttcttgtaattgacggatggcctctggttgatcaccccccggttggaagtcagaatgtaatttgaacaccttactcatcggtatctcactttcctaacattgattcacatataatactggatataaaaccagcttcaagttggttttataaaaacggactcaaataggtcacttccctatcaattaaacattcgttgatatcaaaataaatcccattttatccccaaaattatcttgatttttctattttctatatgattggctgaaaggtgacaacatgggacatcatcacaggtcaggcaggtcttgattttagttatcttattgatatttaatacaattaaaacaaagacgagaataacatcaaccttgacgaaagccgcgtactttcttgcgtcgcgtaacttttctaagtctaatacacaaggttatccacaggaatagtggataactctacaaaccc

SEQ ID NO: 4091 - DNA, 769 bp, Photorhabdus luminescens
acgctagtaccttatatcacgcctaccttgcttatatgaaaggcaataacctgaataaaccgatttctgtaacccgtttatggatatgccgggtgcattggcagagtacgatcagcattacctgcgcaagatataggttatcaaaagtagatgtgttatgaaaataacatacttgatccaataaaatacaatagtactgtaaaggcaattcttagttttctttctggaagagtattggctaattttgctcctaacaatgctcctggtattgttggtattatgaataaccatagataattataatttaaaaaacctatatttccaggtggtaagttatttttatttaggccgagtgatatcataaatattagtacaaatacagaatacaaccagactacaacagttgttgtccctattgattttttaatatctaagccaatgctctcataataaggaacaacaaatgaagctgccccggacaaagttgatattaatcctagtaaaaaacagccaatataacgaaatgaccagccaagatctctatttgtattattttgttgggtattagaaattaatttttgtgttgacctaatcgccaaaattagtgttgctaaagagaagacatatataaccgatcggcttgaaacaacagtcatggtaaaacaacctagtattgaaccaattataattagtggagcagaccattttagaacattccaatcaatatggttgtatttgtgatgtttacaatagcaactagaccaatatc

SEQ ID NO: 4092 - DNA, 688 bp, Photorhabdus luminescens
cgggccattggatcccatttgatattgttcaagggcaaatgggtgtgaattttgatggaatacgttccgttcttgatggtgttattaaaacgccgaaggggcagcttaacctaaatggtgacgcggactggcgtaatgtggatgcatggcatgcacgagtaacggctaacggtgacaagttaagagtcgtttttccaccaatggtgaaaattgatgttagccctgctctggtgtttgaggcttctcctcagttgctgaaattggatggtagcgttggcattccttgggcgcgtattaccgtgaaggagctaccagaatcgacagttgagacttcatcggatgaagtcatattgaatgaaaatcttcagccattacaacagaaaaaagcatctatcccgattcaaagtaacttgacgattcatataggagatgatgttcgtcttagtgctttcgggcttaaagcacaacttataggcgatctgatggttgttcaagataaacaaggcatgggtttgaatggtaagttgatattcttgatggccgcttccgtacttatgggcaagatctgatcgttcgtaaagggctgattatgttctcaggtccacctgatcagccattactccacattgaggctatccgtattcagattctaccgatgggcaaggtattgccagggtaagggagactg

SEQ ID NO: 4093 - DNA, 758 bp, Photorhabdus luminescens
aataataccttcaacttgctggctaatttcgctacctctcagggcatagctcacctgaatatgcaggctattaggcaaatttattttttgattcacctgaatttcagtcatttccactcggggttcataacgtaatattcgctcttcaatacgcgtttgaatacgcgccattaattcatcagtgatattttcaaacagataatcatgcaaaccacagccataatcttcacgcataatccgctcaccgggttcggtgagaaaaagtactttcatactctggcggacatgttctgccccttctgccatgatgactcccgtctgagaagaaaattgtggcggaaatgcccagccccgaccataaatatcggctaatattttgtctgccatcttatttaacctattattgtgttaaattaattttcgcccctttaatatcaaccccagattttccagcggctgatagggatttttcggcttgaatattaatttcctgcgcctgagtgatgagatttttagcggaattaatagtgatatctttatcctgttgcaaagataaggtattttttccactattaaatgcgagcgtattgtctttattatcgaagattaatgcctgctgattctctccctgtttaatcactaacgttttcatttgattcttttcactgggttctaacggtgatctatttttaggattatgcatggcacctaatatcaccggaaaacgaggatcacattcaaagaaaccgattattact

SEQ ID NO: 4094 - DNA, 680 bp, Photorhabdus luminescens
ctgtaactttgacagattttttttgatttgggagaaataagtatcacccagtgacgatgcggtgccaactaaggttcctccctgatccagtacatagtgaaacagaccaaaatgacgatgcaaaaatgctgcggattcattaggcagagctgaaacggattggttgacctgatactgagattgtcttaatagctgtatcatgtggggcggattataagagtctggatctgccaccagcagaatttgccccggtttcaggaatcggtaatttgaatttaatgccataaaatagcgagccgcttcgctatttgaatggctgaataacagactggcttgaaaacttaatcctccaggttgctgtacgacacagaaaccgggttgaatgtttcttttcataaatactctatttgttcctgtggtagcttttaacatgttggcctgacgttagatgacataacttaatcagataatcggattattttcaacatataataaatgggtttctaatctttacagagtgagaatttatagggagtaggtgatgtataaattcaatctgatgttgtcggttgatattgattaatttgcagttttttctttgctaaaggatagtaatagtgaacgtaatttgtttatatatttggtctgactacgagccttcatatttacatttatataag

SEQ ID NO: 4095 - DNA, 751 bp, Photorhabdus luminescens
cgttttaatggcaaaaattttgttgttggtgatgctgctgattttgactggtcacaggtacagctcgctttttttgtggctggattagaggctacggcacaatatgttgaaaaagcgacagaagaaggttgtttggttatcgatagcagtgggttgtttgctatggagcctgatgtacctttagttgttccaggggtgaatcctcatgttttggcggattatcgtaaccgaaatattattgccttagcagatagtatgaccagtcaggtactgacagccattaaaccgctggtggatgcggctggaattgcacgtttgcatttgactaatctgttttctgtttctgttcacggcaaagcggccgttgatgaattagctggacagagcgcccgtttgcttaatggcattccaccggagccaggtcatttcagtaaacaactggcatttaatcttttgccgttgccaacagaagctgaaggttctgtgcgtgaagagcgtctccttgtggatcagatacgcaaaattttacaggatgagggattacccatttcagtgagttgcgttcagtcttccgttttttatggcaatgctcaagtagtccatttggaaacattgcgtccggttggggtggaagaagttcgagaagaattagagcggatggttgatattaacgttgcagatgaaggcgattatccaactccagtgacggaagcatcgggtaatgatgtgctgagtattggttgtttgcgcc

SEQ ID NO: 4096 - DNA, 675 bp, Photorhabdus luminescens
  misc_feature (601)..(601): n is a, c, g, or t
  misc_feature (607)..(607): n is a, c, g, or t
gtgcacgactgaccatcaacgttaacaaggcgcatttcaacttgcttgcccgggcattgccccaattgttcaatgataacaatcgcggctggctggaacaggccaagatcatggggccgaaaaatctgggcagccgtaccgaccaagctgtgatctacctttccaaagccgggatcgagcatgctcaaaccatcagcgaaaagcttagcgaactgttaccggcgacagcctttgtcgaacacaccccgacaggtatgtatcgcgtgggcaagggcatttcctactctgaaacggccgcgggcggatcgagcagtcacggtcagtcccgggcacaactgattgcggcagcaggtacacagtccttgctgaccgatattccaatcgagaagaccctgacgcataccttgcagacacgcgggtacgatgtacacaacccggcgttgctctcacaagcactacgggatagcgagctcaaggggacgctggcaccaatgagtggcgattctgagcctcgtcaggtcagtgccaatatccatcagttcgccgccgatcctgtgttgttcgccaaatccaacactatcaataccgagacattaatcangtcggngagtttcccagcagaagggaacgcccagctagtgaaaatcgaatcaggcttgtacgagctcgaatacc

SEQ ID NO: 4097 - DNA, 744 bp, Photorhabdus luminescens
cgccgcttcccccaatgtggttcccgaacccataaaaggatcaagcacaacctttccggtatatttttggtattcgtaaaaatccttccattggccttcagtaagagcaccggaaacaatagaacggaatacgcttcctaaacgcttcgcccaccatttatgaatatggtagataggacggttaatttcctttctgtaactttcgatttccgcaattggatcaatctgctcgaaaggaaaatcattttcaattatatacttcatattattttgttaacactggcatagagacagacgtacgtatttttgctatacgtgctttgcagtcagcaaaaatatcttcaatcagaacaggttcaacagattaatcaggctttccattatcaatgatattgtacaaaaaattgttttcgtaaatgtcgtaccttgatacttcttctgtagccaaatgcgatatctgaaggttttcacaatcaaattttttcgctacaaaaacttttcttgtatgaaaacacttcaatttgtagtttagtggattagggtacgtatacattgcccgatgacgaacagaaccttcaccgtacggaccgtggttatacttggtttggttcgcaactttggctttcttataaagattaaaatcatagttgatgaaatcaccgtgcatcaaaatgaaagttacaatactgctattgtcattgctcaataatgcgtacatgtaataacaaggaatctcgaccattg

SEQ ID NO: 4098 - DNA, 661 bp, Photorhabdus luminescens
tagctggcaggccagcgcatactcaacagtgaacagcgcaggttgggtataacgtgtagcatttaaccggctgatagcattgtcgcgctccgattgcggataaatcaactgcctgatatccagtttgatgtgtggctgtagcagttcggcacagcgatcaaattgctggcggaatacaccatcacgcagatagagcgattgccccatttcaatagactgactgccttgtcccggaaacataaaaatcaccgcacgaggctgttgtttgcgattaatcgtctgcggtgatagttggcgtagttgattgattaattgctcccgatcttttcccacaacaaaagcacgctcactgaaagcgctgcgtccttgttgcaaagttccggcaatatccgctaatagctcattaccggtagtcaatgctactgccaagcgttccccttgctgaagcaacgtttgcggcgttttcgctgaaattggcagcagatgccagcgctcgtcatctaatatacgggcattttgctggcgcggagcttcttccagaataaggtgcgcattactgccgccaatgccgaaagaacttacaccggcacgacgtggctgacttgtctgcggccacgggcatgctgtattgatcacaagaaactgggtctgttcgagggga

SEQ ID NO: 4099 - DNA, 751 bp, Photorhabdus luminescens
  misc_feature (740)..(740): n is a, c, g, or t
tccgagtcgttttgcacccataattcgtaatgtcagccacattttcaatgcatcaaaacgacgagttgtctggatacttttattgaccagattgggtgtaccctcttgtgaggcactgagtggatttaaatattcggcatgataagtcaaatgggataagtgcttcttatttttgacgaagaaagcactgcaactgactggctggaaaaatgacttatggtaatccaccgtgacagaatccgctaaattaatgccttccagtagataagcgcgacgaggtgaaaccagtaaaccgcatccgtatgccgcatccacatgtagccagatactatattgcttggcgatagccgcgataggatgaagtgggtcaatactgccgaaatctgtggtacccgtcgtagcaacaatggcaaaaggaatgttgccctgttcgatgcattggttaatgctttgttccaatgcttgagggtccatacggaactcactgtcgtgaggaacagatacaacagcgttgtaccccaaacccaggatagcggcggctttttgtgtactgaaatggctgactgtcgaggtaaaaatacgcagtttatgaaaatctgctggcagaccatgtagctgatttttatgttcaggattgcgctggtgacaaaaatgatcccgcgcaagtagcattgccatcagatttgattgggtgccgccactagtaaagataccatcggcatttgtacctaatgccattntatcttcgtga

SEQ ID NO: 4100 - DNA, 666 bp, Photorhabdus luminescens
caggcttcgtgctgttcttcggtacgggaagttaatgtcagacgtgaaactgaactgatactcgccagcgcctctccacggaatcccatactgataatggcttccaaatcatcaagggtagcaatcttactggtagcatgacgagccaacgctagcgcaagctcctgatggttgatgccacagccattatcacggacacgaataagttttactccaccccgctcaatttcaatatcaatacggttagcaccagcatcaaggctattctccaccaactcttttactactgatgcagggcgttctacgacttcgccagccgcaatttggtttgctaattgaggaggtaagatcttgatagccatatttaacctttacttcttggctgctttaggtgcagcctgcaatggatttgccagaaaatagttacgcaatccccgatgaatagcacttgctagcttatcctgaaaatcattagaacccagtaatgcttcttccgccgagttactgataaatcctgtttccaccaaaattgaaggaatatccggtgaacgtaacacacctaagctggcatgttctggcgagcgtttatgtaataaaccgaccttgcgcacttactcaaacctgtactgcaacgtatagcccacccgttgggagtggccgaattga

SEQ ID NO: 4101 - DNA, 732 bp, Photorhabdus luminescens
atattctgcaaaatgaagatcatcgtatcgtatttgttattccttggatggatgaattttccattatcggaaccaccgatgtggaatatcaaggtgatccaaaagaggcgaagattgacgatcaggagattaattatctgctgagagtttataacgaccacttcaagaaacaacttaaccgtgacgatatcgtctggacctattctggcgtacgtccactgtgtgatgatgaatccgactcacctcaggccattacgcgcgactatacccttgacatacatgatgaacagggcaaagcaccattactgtctgtgttcggcggtaaattaactacttaccgtaagctggcagaacacgcaaccgaaaagctcatgcaatactatcccacggccggaaaagcctggaccagaaatggtcagttaccggggggtaatttggaaggatgcgatcgtgatggttatgcccgtttattgcgtaaacgttacaactggttaccggaaggcgttgctgtacgttatgcgcgtacttacggcagcaacagcgaactcattctgcaaggtgctaataatctgaccgatctaggcgaatccttcggtcacggcctgtatgaaacagagcttcgttatctggtcgataatgaatgggtcgttgaactggatgacgcaatctggcgccgcacacaattgggtatgtggctaaaagaagagcacaatcaacgctttgcaccatggt

SEQ ID NO: 4102 - DNA, 664 bp, Photorhabdus luminescens
  misc_feature (1)..(3): n is a, c, g, or t
  misc_feature (9)..(9): n is a, c, g, or t
  misc_feature (17)..(17): n is a, c, g, or t
  misc_feature (22)..(22): n is a, c, g, or t
  misc_feature (29)..(29): n is a, c, g, or t
  misc_feature (32)..(32): n is a, c, g, or t
  misc_feature (38)..(39): n is a, c, g, or t
  misc_feature (44)..(44): n is a, c, g, or t
  misc_feature (49)..(50): n is a, c, g, or t
  misc_feature (61)..(62): n is a, c, g, or t
  misc_feature (85)..(86): n is a, c, g, or t
  misc_feature (94)..(94): n is a, c, g, or t
  misc_feature (111)..(111): n is a, c, g, or t
  misc_feature (113)..(113): n is a, c, g, or t
  misc_feature (125)..(125): n is a, c, g, or t
  misc_feature (140)..(140): n is a, c, g, or t
  misc_feature (191)..(191): n is a, c, g, or t
  misc_feature (231)..(231): n is a, c, g, or t
  misc_feature (248)..(248): n is a, c, g, or t
  misc_feature (266)..(266): n is a, c, g, or t
  misc_feature (279)..(279): n is a, c, g, or t
  misc_feature (359)..(359): n is a, c, g, or t
  misc_feature (380)..(380): n is a, c, g, or t
  misc_feature (473)..(473): n is a, c, g, or t
nnnaagctntgcccggnagagntatcttnggngccggnnaaatngctgnnacaaaagcggnngcgcaattgctggggatcactcnngctctggngatctcaacgccacagnancttaatctggcnactgatgtgcagtcnatattaggcgatattgctgctggtatttatgataaagccgtcatgcatgtnccagcagaaacagtagcggatgtcatgcgcgttgtggacnagttgcgcgttgacggntgcgtggcaattggtggnggctcgacagtcngattggcaaaggcgatagccctgcaaaccgcactaccgattctgacgatccctacgacttatgctggctcagaaatgacnccggtctggggtataacccgngacgggattaaaaccaccgggcgcgatgtgaatgtattgccaaagaccgtgatttatgatcctcaattgacccttagcctgccagcttttatnctccggacccaacggcatgaatgcgattgcccactgtgtggaatgattgtattcacagacatcacaatccgatcacatacatgatcgctggaagaagggatcagggcatttgcgtttaagcctgcctgaagttgtgacaagcccagaaatattaatgcacgtccgcaggcatttatggagcatgccttccc

SEQ ID NO: 4103 - DNA, 737 bp, Photorhabdus luminescens
atttattgtcatatttaatatatctatcggtgatattattcttcgcttgcttcacatttaattaatctaccatgattatttaaaagtgataataaagagaaactaaattttttatataaaaggtagatttaattaaataagtaaaattttttaatagaacagttaattacatttaatcgaaacccttcaatcattaacagaaagttaaaaagaaataagcaagtaaaagaatattactcatacagtttaatattcaaaatctttatttccatcattttacgcagcagaccattaaaataatgtcataaaaaaatgggttaaaccggttaacttggcagaatttaaaccctgaaaaaagcgtgattattcgaaagagtctctttacatcatcatgctatttaccggctgatttataaagataaaaagcgagtgtgattaatgttttttataccttatagatttcaagatgcatcgcgacggcaaaggagcgaatccccgggagcatagaaaactatgtgaccggggtgagtgagtgcagccaacaaagaggcaacttgaaagatgacgggtatatacccgtaatcattgaagatgcttgattttatccgaaatggagatcattatcctcgctatgaaaatattcattaccgatgaacaaaaagccgaacttgaacatctccatcacacctgccgtgataagagggagtgtgatcgcatcaaagcggtcctgctggcct

SEQ ID NO: 4104 - DNA, 661 bp, Photorhabdus luminescens
  misc_feature (661)..(661): n is a, c, g, or t
aacggtaaactccaggcgaaaagcctgacattgacacaaggccccaaccagattgatttcaaacgcggaacccttgttcccatgacaggggaagattatggcccttgggaagcgattgataccgggttattagggggaatgtatgccaataaaatccgtctggtgagtaccgagccgggtaaggttgtcaatctgaccaacctgacggcaacccaaggcgacatcagtctgacggcggatggcaaggtgactctgggggatgtacaggccaaaacggatatcaccgttaacggtaaagacattgacatggtgaaaaaaagtcatatgcaagccggtcaacatctgatattgacaaccgatacattgcagagttggggacgaattcgtgccgacggtgatgtcactattaaagcgaaaaccttgtctttagatgggggaaatatcaccgccgggaaccaggttctgctacagggaaagaacagttttacggtgcgtggcacggatatttcaggtcatgacattaccttgattgccaatagttataatacttctgtttcacctagtgacacgtcggaaagcacacaagtattacctattatttctgcggttaatacgctgcgtattctgtctgaacagggaatatcgctttcagatacgctan

SEQ ID NO: 4105 - DNA, 746 bp, Photorhabdus luminescens
cctatattaaacggagatgttggaggtcggaaaaacccttcagaaattcgggatgctttaactggtgagctttatcgtcaagggtaaggggagataaatatggatcaatttgctgtctttggtaatcctgttgcgcatagtaaatctccgcgtatccatcagttatttgctagacagacaggtattgagcatcgttatgggaaaattctggtgccgataagtaaatttcaagaggcattggatacatttcttaaacagggaggtataggagtcaatattactgtgccatttaaagagcaggcatttattcgagcaaatgagttgactgaacgggcaagactcagcggtgcagttaatactttgaaattacttaataataatcaattgcttggtgataacacggatggtatagggttattaacagacttgatgcgacttgagtttattactcaagggcagcatattttaatcattggagctggtggagctgccagaggtgttttatttccattattagaatttggttgtaaaattacaattacaaaccgcacgtttagtcgcgctatacaggttgctaataatttttcggcaataggcagtattcggcctgctgagatgaaagtacttaatagtcctgagtttgatctcattatcaatgcgactgcatctggtattaatggtgagattcctactatatctccattcatatttaatgagaattgtgtctgttatgatatgttttaccc

SEQ ID NO: 4106 - DNA, 666 bp, Photorhabdus luminescens
  misc_feature (585)..(585): n is a, c, g, or t
  misc_feature (646)..(646): n is a, c, g, or t
cacaaattcgctcaaacccaccaccaaaactttcacgacgatgccccgtcaccagaatcatttttttattagtatcaataaacgggtaatgcttcgctagcttactccgcatagcctcatcattcattattcgatcgcgtacccacagcaacgcatcaattactgtatttccggtaacaaaaacccgattatctgcaatggattctttcaataaattattgtgggaattttccgtcggagcgaaatgatacattgccagatgccctgcaatcttacggtttgcctcttccggccaaggggaataaagatcacccgttcttaatccagcttcaatgtgaccaacagggatacgttgatagaacgctgccaaactggttgccattgttgttgtcgtatctccgtgaaccaatacaacatcaggtttaaattctgctaaaacaggtttcaatcctgccaaaatacgacaggtaatatccgttagatcttgccctgatttcataatattgagatcaaaatcgggagtgatctcaaaaaggtgtaacacctgatccaacatttcccgatgttgggcggtgacacatactntcgcttcgaaggcttcatcccttgccaacgcgtgtactaacggagccatcttgatagcctncggccgagtaccaaacacag

SEQ ID NO: 4107 - DNA, 757 bp, Photorhabdus luminescens
atctactctattatagccacgactattaataaaaaccgtaaagcaaagaaaatctctaaagataatttccttatgcctcaagaattttggcatgagttcaaaaatttttatcagaacatccccactcaaacaaatatcgatgatcaattattaaaaaaatccattacggaaagtatcgacaaacttgaccaaaataaatttatggagaagcacagtgaccgtaagcaaactattatcaacaatgagagagaagctattctgcaacaagatgaaaggattaacgaaattatttcaagcagagcaaaaatgatacagcaacgagaagctgaaaatacagaaggatatatctatcttgccccacacaaaaacacacttttggaatatatgaaacatttacaggaagaaaaaaatctatttcttatattagcagtcaaagaggacatattcaccgaaaaaggattagaacaagatccacaagaacctcatggggccgtcagatataagggagcattatctacagaagaacttaattttgttaatcaagaaggtcaaatctgtgcaatacctgcatctattggggaaatggattatggcgattttattttaaatcagcagcaagtcatagatttttgtaagaaataaaatgagggtaaatataatttcaaacataaaattatatttaccagagatagaaaccctacactttcggctcacataaaaggtggaaagaaaaataacttacgtgaaaagctatttt

SEQ ID NO: 4108 - DNA, 675 bp, Photorhabdus luminescens
  misc_feature (476)..(476): n is a, c, g, or t
  misc_feature (488)..(488): n is a, c, g, or t
  misc_feature (588)..(588): n is a, c, g, or t
tgtaatgatattctgcccccctcgggaaaactacgaatagcatggggtttcctggtgtttattataattaaatctccttgctctggtttaatgaggacagatggcggaagcgtgcctcgccaatcattttctgcattatcttcaattaactcggtgatagggatttcaggaacatcccacagttccagctctcctccagttgcaggcatttttatatagatattcactgagaattgccccaacaaattgacagattgttgttgaagaccatcgaaatggggttgtttttcaaccatgaaagaacgttctggtctgttcatcactctggcaatccccgcatgcatctttttaccttcaaagttggcaatgctagccccggcagaccatacttcatccagttctaaacgaaatttatcgaaaggggctaacatgggagcacagaaatttctgacgtttctgatggcaggtaacgcatnttcaaaatattntttatagctatcgctatctttggatttgccaaaagttgtgttgtaagacgggccaattctatcaacacccatatcaactaaaacaacttcatctcctttnttaaatcatgaggatgacattctagattttcgtgagagaggaaaaaatcagagagcttgtctgcaagagagatatcaacatatttct

SEQ ID NO: 4109 - DNA, 758 bp, Photorhabdus luminescens
  misc_feature (576)..(576): n is a, c, g, or t
  misc_feature (580)..(580): n is a, c, g, or t
aatgaaagtaaaaatggaggatatatgagcacagcagtacaaaaagtttatgaaatcatcaacccgctcaagactgaatttgagcaaatttgtagtgagccgggcatagtatttaaacgtgagtctgaatttgctatgcagatattcgcaaataatgattttttagccacaactgcattaaataatccggtttcagcgcgtagcgcagtaatgaacattgcagcaattggcattagtctaaaccctgcgcaaaagctggcttatctagtgccacgaaacaaaagcgtgtgtcttgatatcagttacatgggtttgatgcacatcgctcaacaatcgggtgctattaagtggtgtcaatccgctgttgttcgaaaaaatgacatattcaagcgcacatctattgatactgcgccaattcacgaatacaacgaattcgacacagcgcaatcgaggggggacattgtcggcgcgtatacagtaatcaaaacggatgactgtgattacattactcacacaatgagagcatcagctatatttgatatcagagatagatcatcggcatggatagcatataanacanaagggaaatcgtgtccgtgggtcacggacgaggaacaaatgattttaaaaaccgtagtcaagcaggcggctaagtattggcctcgcagggagcgattagataaagccattgactatgtaaacacagaggcgggtgaaggaattgattttagcaaaggtcaaaactcttacattgacgt

SEQ ID NO: 4110 - DNA, 673 bp, Photorhabdus luminescens
  misc_feature (671)..(671): n is a, c, g, or t
tgcccgaagatgaatctattggtaaagccgagttaccagcactcgaaattaaacaatataaacaacaattcactgatgatgagctgtgtagtctttgctggttatggcgagatgctgtcgagatgattagttcaatatctgatgtttatcccattctgagagctgcggaacataggcttgaaggtaaatattattcaatgtcacatgaatatccacgaaacatgaacatagtccggcgagtattaaacagcttaagatttggaaatctaccgttctaaccctaagccagggatggattacattctgaacttgcttagtcaatattaaacgtattacactcatttctatacggtctgtatagatctagttgcccgatacagaggagaagagaaatgagattacgttgcatggcttatcgtcaagatgggatgtatgtagctgcctgtttggatctttctttggctgcacagggtgacaatatagatgaagcagtaataaactcgaagcccagattgaagattacctcagtgaggtgaaatcagaacctcagtacgaataacagatgttaagccgaaaagcaccgctatctatgtgggttaaatattggcgaattgcctttcgattttcatgaacagaaaaacagtggcctagctaaagttttaatgaacagngg

SEQ ID NO: 4111 - DNA, 751 bp, Photorhabdus luminescens
tttaatagaagattaaatccttttcgtttatgagggcgaccaacataaataaaaaccttcatatttttgtctatgccatgtttctctttaaggtcatctatatatgacaaggataatttattgtcataaaattcattaggtagtccagaaatagaacctgaaccaatcaccgatacatttttatatgttaggcagcttaaatagggaaccagttctttatttactgtcaagatatccgtggcaaaaaaacagtttattttttcaatggattttaatgcatattttaataaaccagaatatcctatgtaagggacaccatgattataataaacacgtcttttaattccaaatataaaagatgctaataatggtagaaatgcacctttagtcatatggcatatgataatatccgtatggtttttcttaaaaaaacaaatcaatctaattaaattaacaatcaataggaatggatttaaggaaaaacaaaatttagatttaatatatttacagcgcaaagcatccaagaatttggaagagccatttaacggatcaactaaaagtgagctttttaatccatattcaatttcagataaaattaatggctcaataaatctttttgcagtaaatgtatttacaacagtatgtataacattcattaagataaatcacttttttggtagaataaaaactttcaatgagctaatcatgaaccccagtaaccagataagccttggtctaaaagaaactcccg

SEQ ID NO: 4112 - DNA, 667 bp, Photorhabdus luminescens
  misc_feature (537)..(537): n is a, c, g, or t
gcctcagctgcttatgatcaaggccgaattgccgcccaagcgatgacgaaaggaaacgccgaagttcatctgattgaagatatcccaacgggtatctataccattcctgaaattagctctgtaggtaaaaccgaacagcaattaacagcaatgaaagtgccttatgaagttggacgcgcacaatttaaacatcttgcacgcgcacaaattgcggggatgaacgtaggaagcctgaaaatactgttccacagagaaacaaaagagattcttggcattcattgtttcggggaacgtgcggctgaaattattcatatcggccaggcaattatggaacagaaaggtgaaagtaatactatcgaatatttcgtcaatactactttcaactatccaactatggctgaagcctaccgtgtcgcggctttaaacggccttaaccggctattttgattgcccgtaataagtgcccattttagctctaatagcctctgcaagttgctcatagcgaccacgcagaggtgaaccaggacgataaatcanaacaacagaccgcttaggttcagggctgctacactccagatagcagacgccatcacgttttttttctcgtggcactgccaatcaggcaataaggttattccactacccggagcaacctattacgcagggt

SEQ ID NO: 4113 - DNA, 750 bp, Photorhabdus luminescens
ttgatgaattatatgcactaaaagacaatccatttgctaaacaggatttggacgccgtagaattcttatggcaactcaggctcaaatctgccgacgctaagttccaaccaatatgggagcgtcttgccgtcctttggacaggcagcatcagctcatccacctcttacttccacaaaatacatgcagcactcgctttttctgcaataaatcagtcttttcttatcgagaagctaatcgcggaaagcgatggatttggcatcgaaccagacacacattccacagggatagacgtccttaaagcgatcttactattcacatcgagacactacgaagagtgtttaagcaaactccgtctcagctatgagaaatggccattattgggaggtagccgtgctcaacgtgaaatattagaacagacgatggaatacgccgccttgaaagcctcttccaccctataaatcgcgatattgacaaacatgaaaagcaaccacgcatgaacgccagccggtcaacaactactcaacctatatcaagctggctcttgtggatatcattctgcgcgggacatttggtgcaggtcgatatatttcttgtcagacaccacctttatatcaccaggctaagattcttctcgcggccctgaccccactaccttcctctttattccgaaacacgtcggaaacattaacgatggcactctcgatacattgggcctgggacctagggatatacagtaccaccggcttattt

SEQ ID NO: 4114 - DNA, 763 bp, Photorhabdus luminescens
  misc_feature (417)..(418): n is a, c, g, or t
  misc_feature (518)..(518): n is a, c, g, or t
ttcctcgatatcttgtttagaaacaacaattttaacgccgcctttggcggtaatagtcagtgggctatctggtgaggtaattaatgccagtggatcgttaccccataatctcgggtaatatccctgagcaatctcccaggaccaattatcgttcgacaatggcgtaatagttgtgtcgtgatgagctaatgctagccgggtgacactctgaataccgttaatcgccaataatcggttaaccagatggctgagatttaataccgtagcgccggtgtaatttttggtttgaggtaatgtcggtatccagccgtgatgtaaataagggccggagaatatcttttcattactgtagcccagatctttcatggcttgagtggtatagcgcccgggcttttccagcaccatctgttccgccgnnatataaacctgagcgaagatatcaggaatatcgatgacgttatcattaagttcaatatcaatctgcaagaggaaattgatgggttgcagccagataattntgctgacggattcccccaagttacggttattttttaggaaatcgttgagcttctgctgagccagcttattatcggcctgagtttcctgaccaggaagtaaataaagccaataatttcctctcaaggttaatttgccgtcggcacccaaatcgttaaaggtatatttacgttcctgtttgttataccaatatttatagcgttgttcttcaggttcaacggatcagtggacatcattaaagataaat

SEQ ID NO: 4115 - DNA, 672 bp, Photorhabdus luminescens
  misc_feature (375)..(375): n is a, c, g, or t
acgatgtgacactactgatcgccgccggagaagatattacgaccgctgtaggaacactttgccaattaggcaaaggattattcgctatttttgacggcccaacaacccaaatagcctcaacacaagcaccagatgatgtacttaaaccttatccagcaactcaatatggcgcagtttactatccctggctgactgctgaatggggagaaaataaagcctccattgatattccaccaagtgccgtcatggccggtatttatgccaatgtcgataacagccgaggcgtctggcaggcccccgcgaatgtccctgttcagggcggattacaacctaaatatccgatgaccgacgacctgcaagggagatataaccagngtaaggcactgaatatgatccgtacctttcctaagagcgggacgctggtctggggagccagaacccttgaggacagggataactggcgttatatcccggttcgccgcctgttaacagtgcagaacgagacattaaaaacgccatgagtttcgcggtattgagcctatagccaaccacttgggaagcggtgcgccgggcgattgatactatctccatgccctctggcaccaggcggactgatgggtacaaagctgaacaggttattttgtgcaaatcgttaagacgcaccatgactga

SEQ ID NO: 4116 - DNA, 747 bp, Photorhabdus luminescens
  misc_feature (501)..(501): n is a, c, g, or t
  misc_feature (747)..(747): n is a, c, g, or t
tttgctggtaacgctatcccggaactagcacaacgtgttgccaaccgcctgtacactaatcttggagatgctgctgtcggccgtttcagcgacggtgaagtcagcgtgcaagttaacgaaaatgtgcgtggtggtgatattttcatcatccagtccacttgtgcaccgactaacgacaacctgatggaattagtcgttatggtggatgcactgcgtcgtgcttccgcaggacgtattaccgcagtaatcccttatttcggttatgcccgtcaggaccgtcgagtccgttccgcccgtgtgccaattaccgccaaagttgttgcagacttcctgtccagtgtcggtgtagaccgcgtactgactgttgatctgcatgctgaacagatccaaggtttctttgatgttccggttgataacgtatttggcagtccaattctgctggaagatatgctacagaaagagttagaaaaccctatcgttgtttccccggatattggcggngttgtccgcgcacgtgctattgctaaactgctgaatgataccgatatggccattatcgataaacgccgcccacgcgctaacgtttctcaagtgatgcatattatcggtgatgttgctggccgcgactgcgtgctggtcgatgacatgatcgataccggaggcaccttatgcaaagcggctgaagcattgaaagaacgcggagcaaaacgtgtatttgcctatgctactcacccgattttctccggn

SEQ ID NO: 4117 - DNA, 794 bp, Photorhabdus luminescens
  misc_feature (39)..(40): n is a, c, g, or t
  misc_feature (46)..(46): n is a, c, g, or t
  misc_feature (659)..(659): n is a, c, g, or t
  misc_feature (686)..(686): n is a, c, g, or t
  misc_feature (732)..(732): n is a, c, g, or t
ttcgggaaaccacgtgagtcacatgctggctcgtggtgnnaaacgngtctcttgtgagcggaaacaatttcacacatgaaacagctatgaccatgattacgccaagctatttaggtgacactatagaatactcaagctttagagcaaaaaatttcaggtatttccagtattcccgttggctctcctattccttggccgttgtcccatccaccttccggttatttcacttgtaatggttccgcttttagtagatcacagtatccgaagttagcagaagcttatcctgatggcagaatacccgatttaagaggcgagtttattcgtggctgggatgatgggcgaggtgttgatagtggccgtgttattttaagcgcacagactgacaacacaaaaagaatacaacttacgaaaggactccctgatgggcaatttctttctagttatcaaggtcctgtagatagataccagttcccgctggggcgtgatgttcttgagagtgccactgttacatcaattgctaacaatacaggcggtcatgaaacccgccccgtaatatcgcatttaactatatcgtaaaagcagaattatattcgaaagggtcaataataatgacacaggagaatattctagatactgaaaccgctgattaggtgaagacngattagcatttaagctggctggataanagttatcatgctattcctatacgagagaattctctgcctctgattncgatatgtcgccgaagcgtgggtttgtaatgcattcttattggacgcaccaacctgccgata

SEQ ID NO: 4118 - DNA, 750 bp, Photorhabdus luminescens
  misc_feature (750)..(750): n is a, c, g, or t
tacccgctcctcccgcagagggtatgccggggactattccgcagccgttgacaaaaaaactcccgctggtcagtacttctccctggtcttttttacccagctatgaagactgggttatcctcgggcaggaggtggctggcctaacagaacaagggttggattatatccgcgacagtacccgcgaactccttgctcaatttggagcatggttaaatcaagctgggaagtgggtgtgtgaagagattattgacccgataagccatcaggccagctatgcgttttcctgggtcagtgcacaaacgggaaaaatcgtgacctggacggagagtgagataaaagcccggtggcagactgtgcaacagggttcggacatcaccctggaagagctaaaaaacattagctggatgcagatattaaaagaggtgggtgaaggaatgctggaaatggtagtgattattgccggtgttgccattgttatccttgtcacccttgccgtcgctgccgcgctgattgcactggtggaaattttagccgctgctgctgcggtaagcgccgctgcattggccaccgtcttggcaatattggcgagtgtgacatttgccaccgcttcatattaacggagaaatatggaaactggagatactttgcccaactgagatcaacactgacctcttttctttttctcaatggcgacggactgacctgtttccgcctgggtctctcgataaccctgtttttaaacagggttan

SEQ ID NO: 4119 - DNA, 743 bp, Photorhabdus luminescens
  misc_feature (210)..(210): n is a, c, g, or t
  misc_feature (222)..(222): n is a, c, g, or t
  misc_feature (388)..(388): n is a, c, g, or t
cgatcagacgatagaatttactacggtcactggctgaacgcaagcgtttgggtatcacccccaaatcaaacatcagcgcatgataatcggtaatagagttaaattgtttgaactgcacgccttccatttcatcaaggcgatctttcagttcattcagtggcaatacacgtgcctgtctttcacccacattttcagttaatagctgcgtangttgcatagcanttggcaagccttggatcataaagggtttgatgtcaaccttacggtcacgtcccgccacctgttgcaatctcaccccgaccaccacccgctgatggcgggagttaatcacatccaaggttgagtaacagacccccgcccgcaatttgccgtgcaaacctttatcacnagaaccggaagtggcaccggctccggtggtgccacggaaatgcaacaaggttaaatcagggatcagcgcggtgccaaaagccgccctcggggtagatgtacccgcccattaccccctgacgaggtggcgactaacttctgatgaccagctgcttagtcgtaaaaccaaccccctgagccggcgttcccctttcaagtttacttatcatccaccccggttcatcatcccatgtttctttcccttaccccccccaacacattcacattctcgctcttccccagttacatgcccccccaactccatcctcccttcgttttgtcttcctcatcgatttccttgttcattcccccactcc

SEQ ID NO: 4120 - DNA, 668 bp, Photorhabdus luminescens
gaattgaggccagtagccaggcttgagcaataatcaataatccactgattaagccaaataacatggacaggcggagccagcgttgggccggggcactttgctgtttcagccagcgaaccaattcatactgtcttgttttatccataaggaaaaattctaattcaacaggtgagggtaatggtgtaccaaaaggctggacatatcctatgtgtcagcatcctgctgatatgttacatgctaaaaagcgctaccgaaatagctccttgaaagacaaagaatttatttagcggctagcccatccaggaaacgctctgcgtcgagggctgccatacaacctgtaccagcggaggtaattgcctgtcggtaatcatgatccatgacattactcggctgcccatactccgcgaatggatcgctgacgggcctactctggtaatcccatgtacctttagcgttacccttgtgcagtcctgatgcgactttcaccacgatcgcatctgacattatccgcgcacgacatctacccgctccttatacccaggcgtatctatctcctctttcgtgtcctctttgccatcccttgttcacgccattccattccctctttccctgtgctcatcgcgatactgtcgcggtcgtcatcgcgatttgccgcgcttgctccgata

SEQ ID NO: 4121 - DNA, 741 bp, Photorhabdus luminescens
ctgacgtcaacgacgatttcaagatcaagttcactgaatgttttgtagacttcaacggcttcttgcttggcagcatcacgaacagcctgttctgcggctctttgttcctgagctgctttactacgccatttagcactgtggatacgcttcatagaagggcggtttgtttcggcggatttagcaagccacagcgctttttcttcattatctaaagctactgctgctttttccaatgcttcctcgtgctgggcctgaagggaacgatgatcaatacgttctgatgaaccagcagcagcaaggaagctgttcgccatcgatgcccatgattcacgccacaacacagacatttttctgtcgttccagcttctttcttttttaccaaaaccttccgggccaatggtttttaatgtcaacataacgtgagcgtgggggttatcactatcaagatcatggaaagcgatatcagcaatcatgcttttatcaacgaaatttttctgacaatactcaaggacaagttttttcttatcatcattgtttaactcggtaggaatagcaacatcgaaataacgagctgtttgtccgttattttgacgttcaactctttcaacttcattccacaatgccgtggagtcctttacgatatgttgaggagcattaacgggggctaatatgaaatgcccgcataaatcagtacggcggctataatcataggtatcacctgttctttcatctgtgattctg

SEQ ID NO: 4122 - DNA, 661 bp, Photorhabdus luminescens
tactcgatgtgttacagaaatctggtgctgaagtcatgatgttacgcgctgatgttgctgatgatgcggcattgactaaagcactggcacagatgcgggcaagatttggtgctatcaacggtgtgattcattcagcgggtattgaagccagtggattgctggagcatggcacgtcgcaggactggcggcatgtgatggcagcaaaagtaagtggtacacagcaattgatgacggcgataagtcaggaccctctcgactttgttctgttgtgctcttcacttgcctcattggtaggtggaatgggtcaggcagactacgcggcggcgaaccgttatcttgatgccgtggcgcactattggcgacagcaggctataccggtaacgtcagttaactgggatacctgggcagaagtggggatggccgtggattatgctgcacgccgtcaagaaagcgtgatcggtctcagtaatcaagagggctgcgctattttcgatctggcgatcgctggaatggaagcacagatcgttgtcaataaattttccccctgttcagcgcacacaattacaggatttatcagtgatatctgattccgccagcccagaggaagcggttcgtcaattgtggtatgagctactgggcgaatagacgattcacttggaag

SEQ ID NO: 4123 - DNA, 748 bp, Photorhabdus luminescens
  misc_feature (565)..(565): n is a, c, g, or t
tatatcaacagttaatagatgctctcggtcaataagcaacaataaggcttgactgggagtagtgctaaatacttctcttgtttttagtgcagaaaaattaaacttataatcttagatttacaatatgtatgagctcacacaaaacccatttgataaagacaaactatcttttttgctgtatttaatgcgttgaaaataagtttataccatgtgtaaaacatagcgttaaaaagagtatttaaaatatgatttttccaaaaaagtatcctctcagcacgataaaaaggctcatctccggctggaaagaatgtagtttcgaacgttaccaacaagcgtattctctctatggtggtggaatatctactcatccagatattgtacgttttttaaatgaaaaatttggcaatagttttatcttttacgtcaaagaaaatccacaaatagaaaacgttatcgaaggggcatactttacatgtaaagatcatcatctggcagcaagtcaccaaaaggactactattttttcagttacgatgaaattctcttccctattgccaaacatctaanaactattatccctaggaagtcaaaaaccatatcacctctgcacaaagaaaacttcgtcaacatctattatggccgattaaacaagcgaacaatatgccttgctaaagaagatttttcttataaaacaagaagaaatcggagtaatgaaattaataaatttaagcgtgcaggcggagaaatact

SEQ ID NO: 4124 - DNA, 665 bp, Photorhabdus luminescens
atctgacttttgctgatatgacgttaaatatgctggataccaaggaggtagcgtaatgaaagcacttaaatttaatcgggtgtgggatgtgcaaatccaggatgttgaaccgttacgctgtgctgagcctgatgatgttgttgttgatattgcggtgtgtggcgtttgtggtacggatgtcgggattatcaccggatcttatcctgttgctattccgggaaccacgctgggccatgaaacaacgggggttattacgcaaatagggaagagtgtcacgcgttttaatgtgggtgaccgtgttgtcatcaatccgacctattcttgtgggcattgtcggatgtgccagacaggcagtccaaatcattgtgagaaaaaattgggaaccgaagcaggggtttcctatgatggggcatttgctgagcaatatctggctaaagagagttcgctgataaagctggatgatcatgtcagtatggaagaggcatcattgactgagccactcagttgtacgctgaccggggttgataaactgggcattactcatactaatattcgtgcagcggtagctggcgcaggcccaatggggatgctctacatttgggctttacatgccagaggcgttaaggctttcatggtcgagaaaaacgaaagtcgaattcaatttg

SEQ ID NO: 4125 - DNA, 738 bp, Photorhabdus luminescens
  misc_feature (651)..(651): n is a, c, g, or t
cctctctttggggttagatattccttatttttgctggcatccagcgcttggaagcgttggcgcttgccgccagtgtgcggtgaagcaatatcaaaatgcggatgatacgcgcggtcgtctgatcatgtcctgtatgactccggcaacggatggcacttttatctctattgatgatgaagaggctaaacagttccgtgagagtgtggttgagtggttgatgactaaccatccgcacgattgcccggtatgtgaagaagggggcaactgtcacttacaggatatgaccgtgatgactggtcatacattccgtaaataccgtttcactaagcgtactcataacaatcaggaattggggccgtttatttctcatgaaatgaaccgctgtattgcctgttatcgttgtgtacgttactacaaagattatgccgacggcgctgattttggtgtttatggcgctcacgataacatttattttggtcgccctgaaagcggtacgttggaaagcgagttctccggtaacctggtagaaatctgtccaaccggggtatttactgataaaacccattctgaacgttataaccgtaaatgggatatgcagtttgcgccaagtatctgtcaacagtgtagcattggctgtaataccagcccggnggagcgttatggtgaattacgccgtatcgagaaccgttataacggtacggtaaaccactattttatgtgtgaccgtggtcgtttcgg

SEQ ID NO: 4126 - DNA, 665 bp, Photorhabdus luminescens
acctattgtagataacatctgattaaacagcgtttgttccttactctcagcgctcacatcccccattcgtttatgtgtcaataactcactgttattatcaatggtaatatcatgatttgcagttaaagaaatattatgacttttcgttaagaggatattgcgaagaagaatgttcttacctgcatgtaagagtaaatcacccgtagcttctaagctacttattttacgcgtattatcaggattaaaataccctggtttgctactactctgaaactgaacattcccgttgcggctgataatagttacatctttggcttttagttcaccttgcaaagcattaatattattagttgctgtcatagataagctatttgacgaaatcaatgctgcattattaagattaatatcattctcggaaataatatttaacccatcaatagcctttagtttatcagtgatattgattttacctgcgtgaagcaaaatgttttttgctgataatgtgtcaggtcgggcagttacagttacttctgacagattttttgcattatcaggaatcaacgtactgatatttaaattgtttttaaaatccgctactagatttttttccgcactaattgaagacgatatataactttcttccccccagtatataactctccttg

SEQ ID NO: 4127 - DNA, 747 bp, Photorhabdus luminescens
tggcttgtggaaattgtctggtgatattattccggtactcttcctggatataagaggaaaggccgccacgaataaacagggcagggcgaggccatgtagggatttcttgccagccgatgatcttttcatactggttaattaataccggtaaattgaatttccattccccctgatggaatgatttcagtaaaaactgaatgacaccttcttcctgaatattttctcgcataatcttagcggcgtcttgacgggatttaactccggctgctgtcactttgttcagtgcggtaaaaatttggtcatgacggtgaacctgataggcaacgggggctatatcaataagaacaattttttctatccgctctggtgctagtgcagtcattgccatcgcgatcttaccgcccattgaatgaccaataataatggcggactgaatttgcagatgatccagcagggaaataacatcttgtgccatatcgtggtaatccatgttatttgcccgtggagataaaccgtgattgcgtacatcgacttgaatgacgggatagtattgctgcaaatcacgagccaaaaccccaagattattgagatcaccgaataacccgtggattaataccacagggataggagagagcggattttccggtatctgcatatggtagtttaatgggttgactaatttcatgatgagaattgttttctttcaggtattgatatcatgccgtgtatattgttgcttaaatataa

SEQ ID NO: 4128 - DNA, 678 bp, Photorhabdus luminescens
ttgtgcttcactcaattgattgggattagcacgaatgcttcccaaatctaccaatttatcatgccctttatgactagccatatttgccaacgattgccgcaaataatcaggaccttgattggcaccgggccttccctgattgcgcttcacaccttcatcacattcaaaccctaatagagcaacatagtgagaaaattcttccggcgtaaaatacggagatagtttaactgtttgaaaaagccgtagtgcattatccgcttctgccaaatcatttcgtccttgccaaatagtcggcgaagtagcatgccataaattcatttaccgctccttatctgttatatatgctggaatgagtcataacaccacgaaacactctggtattcaaagggttatgacccaactcatagaaaatatcaacgggattctctgcatcccagaccacaaaatcggcgtaagctcctgcgcgcaactgtccgtgacgcggttctctgcccaatgcacgagccgcatgtcgggttacacctaaccatacctcttcaggagtcaatccaaattgaacacatgccatattcatggccattcgcaaagaagcaaatgggctggttccaggattaaaatcggtagatacggctatcggcacattaaattgccgcataaatcaataggagggcaccgtgt

SEQ ID NO: 4129 - DNA, 749 bp, Photorhabdus luminescens
  misc_feature (396)..(396): n is a, c, g, or t
ttaacagcgacctctcggtaagttaacgtatcctcatccttacggacacaagataaatgtaatgccagttctgccagcgtattagttcggtaaatcgcgcgcataggcagctcataaccacgctgagccagctctgcgcgcaatgacataattaataaagagtgaccacccagagcaaaaaaattgtcgtggcggctaactttattcaaggctaatagcgactgccatagttgcgctaatacccgttcggcttcgccttcaggggcaacaaattcctgctgactataatcttgtttttgtggtagtggtaattgcttgaaatctaacttgccgttttgtgtcagtggtaatttctctaactgcacaacggcaacaggcaacatgtaatcagccagnttgctcttcatcgccagatgaatagcattaatattgatggttccttcagcaacaatataagcaattaattgtagtcgatcatcagagccaagttgtcggggatagacaactgcttcatgaatgccgggataatccattaattgattgctgatttcttctggctcaacacgaaaaccgtttatttttacttggttatcattacgcccaataaactctaaattaccattggataactgacgtacaatatctacagtgcgataaagtcgtcccgggccaaaaggattagccacaaaatacttcgcgctatcttgctcacgattaagaataccacgcgttacacctggtccaacaat

SEQ ID NO: 4130 - DNA, 667 bp, Photorhabdus luminescens
  misc_feature (97)..(97): n is a, c, g, or t
  misc_feature (172)..(172): n is a, c, g, or t
  misc_feature (188)..(188): n is a, c, g, or t
  misc_feature (248)..(248): n is a, c, g, or t
  misc_feature (265)..(265): n is a, c, g, or t
  misc_feature (287)..(287): n is a, c, g, or t
  misc_feature (296)..(296): n is a, c, g, or t
  misc_feature (361)..(361): n is a, c, g, or t
  misc_feature (382)..(382): n is a, c, g, or t
aaaccctgtagtgggtgcggtgattgcgattgcggtcgcggcggtcacggcgggttcgggcctggcggcctgagcgggaagtggtgccgtgggggcnacaggcgctacgggagccacggcgagcgcggtttatggggcggcttatggcggaatgatcgggttgacctcgcangcggcggtggccttanttgaaaataaaggggatctcaccaagacactggctgccttagcgaagcgcgaagccgtcnaatccctcgtgacccanatcgccgtgggtggcgcattanggggcttanaccacacgatgggctggggaaaattagtggagggaaaaggcgttgtcgatccgctaaaagcgcancttcccttattgagtaatcanaattggagtcaggtggcccagcgtgtcgcggcacaatccatcgtgagttcaacaatagggacggcgattaacggttgcagttctacggataacctgcaaaccgggttgatgagcaatataggtcaccatattaatgctgaaggtgccaactgattggtgataatggtgagattataagccattcatgcaagatattgagccatacgggttgtggcaggcattagcgcttaaatttgccgcggggattccctaggggcggctgtgggtgcacttgcggctgattaa

SEQ ID NO: 4131 - DNA, 752 bp, Photorhabdus luminescens
  misc_feature (647)..(647): n is a, c, g, or t
agcgttttcacaactttgctctggcgtggcataactcatgaagggcatatcggcaatgataaaagtataaggtgttccggcacggacacagcgagtatgatagacaatatcttcaaccgtcactggaatggtggtatcagccccttgcacagtcatacccagtgagtcaccaaccagcatgacatcgataccttgctcggcaaacaggtgggcaaagctggcgtcataagcggtaatagtcgcgaatttacgtttttctttcttgagctgattcagatcagtcatggtcattggtttcattatctatcttccttctcctgcaatttttcttgttatgtacagaaatcggccgcggactgaactgagatccctatatgtagtgattagaatcagaggactgcggttgcagccagagtgccaagccgttttctgggatgtgtttcagtctttcagataaagcttccccatcaggaaatataagatcaggggcaatttcagctaacgggtagagcataaattcgcgctgttttagtccgtagtggggtaccgttaagcgttcggtattaatcacttgatcaccaaatagcatgatatccagatcaagtgttcttggcccccagcgttcatcttttcttacccgtccttgngtcagttcaatcgcctgagtgtgattgagtaattcttccggtgctagcgtggctccagtgcgactgctgattcagatatcaggtcgatctgcggcccatcgttta

SEQ ID NO: 4132 - DNA, 675 bp, Photorhabdus luminescens
  misc_feature (514)..(514): n is a, c, g, or t
tcatatcgtatatggaaaactgtaatgagttctggtatataaaagataaggaatcgagatttatctatatgaatgattacggacttcatcatagcggactacccaaagggtttaatgttgaaggtaaactggatagtgaatgcccggtttattggtctgagattgctgatattattcaatctaatgatcgtagagtgatggaggaaaaaaaagtcattcctactttgattacatttatgtatggcggtagggataaaattattcaaccatttatggcggacgtcacgcctttgataaaagatggagagtcgattggcgtagtaggcagagctaaaaagctagaaattttttcaatgtatcatatggaaattaataaacctcctgaatcattatcatttggcaatccaactgagatttttacagatagagagttcgatatagtattttttgcgttgcaatcactcagtgctaaagatatagtgagaaaattaagtattacctatagaacggtacnaagcaagtacaatttatttatccaaaaatagggataaatttatctaacccgttaaaggaatattgcacagataggggtaccataatttgcttctaccccgattattaacacgaatccctatatacctctcgcctaacaatgaaccacatcgttatttcact

SEQ ID NO: 4133 - DNA, 753 bp, Photorhabdus luminescens
tatggaatatatatccaataaagttcatcataaccaattaattaatcacctcaatattaattggtttttatatacttaatccaagtaaacataggagaaaactttattattaaccttaaattatttgaaaaataattatccagtatacttttaacacccaaaaatataatcacatttggctaattataattttaataataaatactctcaatgaaaatttttaccactgatgatttcgcagatttcatggacaacaattcactaactcaagatattcccaataaactgttgaaagtttataatctattagccaaaaaatttgttaatatcaataatagtaatcttgaagacaacttataccctatggatttcaagatgcatcgcggcggcaagggagcgaatccccgggagcatagataactatgtgaccggggtgagagagtgcagccaacaaagaggcaacttgaaagatgacgggtatatcatctgatttattaatcgaggtaacatataatgaataataatcgactcatcaaaatgcagaaaatggctgagcgttttcatcaatctggcacaatatcaaatatcaccatgagagaaattaatgcattggttaaacaagaataaaacatgaatcactcttcatctgatgtggtggaccggaaacgcataattaagtgaaaacatattttcccggacgcatttcactaaccgtatcagccaattcaattaattcagtaaggtaatcttgtc

SEQ ID NO: 4134 - DNA, 677 bp, Photorhabdus luminescens
tatgatgcggggtttagccatgaatatcgccgggcatgaatcgattgcggtgttctgtctgacgccgggaggggtcagactggtacatcgattgaaaactcatcttcctctgacctgttttaccagcgaaaagttactggagccggggtttacgccttttaatggcagctttggcgacacgttgcgtgaggcatttaaacactattcggcgttggtggtggtggcggcgctgggcatcacggtacgcctgcttgcgccacttataaatgacaagatgcatgatcccgctgtggtggtgattgatgaagggggtcagcatgttattagcctgttatccggtcatgtgggtggcgctaatgcattgactcaccatttggcggcgttattgggggctgatccggtgatcacaaccgccaccgatgttaatggcatggcggcgctggacacccttgccacgcaattagatgccgatatgcaggattttccccacgtggtgaaggtgataaatcaaatgctggtcagtggtcaaaagtggggttgtggtgggatgaaccactgcttagtgaacgtgagcagtgtgatatccggggttttgtctcggtagcgtgtctggaagattgccagaactggatgcgctggtgtgtatcacattgcgagatgcattggccggatttgct

SEQ ID NO: 4135 - DNA, 756 bp, Photorhabdus luminescens
  misc_feature (714)..(714): n is a, c, g, or t
tacgccaagtgccgtcaaaatgcgttatggtcatctgctgtcggctgtataacaggatgtcgcggtccagttgctgcttgtaagcgttgatcgcaggtgtgccgggcacatcgttcatctgctgccgtctttgctgcaatgtctgcaactggtcgccgacagaaacggggctgtcctgcatctgaaaatgctgagcagccagcacactcagcgtactctgctgcatttcctgtaaccgctcgtctacctgcctgatgtagtcggcacgctcatcaggcctcatattaaaccattcggtctgacgacttgctgcctcaatctgtccatcgatcagggtattgagcaggttcgtgaagtctttggatatagaaaccattgcaatgctcctttgcctgtttttaagcgaaacccttcgcgctgcgaaaagctgtttgtcgtttgtcgtttgtcgatacagatttgacattcttcccgacctaaagaccataactttaggtacgaacgtattcagttaccgcagggattcccgcacatacggtcgagtcgaaggcagatgtcattttgcattactttatttaagtgatagttacatatcattgttatttatattcgtgaatattagatagtcaacatttatttgctctgtagttgtagtcataattatcccctttatttttcgtttatattgtggatcacatgagtgatgacattganatataattaattctttgtatatttaaattaaaattatcaacc

SEQ ID NO: 4136 - DNA, 675 bp, Photorhabdus luminescens
agtgtattggtggatttttttgcatcacgtggtttccctatagtggtaaacttcaactatggaacctcttttaaaggtgcgcttgatgatgtaagtggcgcgattgatctgctactaccgatacttgagcggcacggcctcaaagagcggactcttgaaattaccttggaaaatggcaaagttattaaaagccttcgtaatggctattggttccacattgacggtgctttgggggctgcgtatggtccgtttttagagaaagcgagagagcagggaatagatattggtgagggacatcttccttcatttgatttcagaaacccagttcattctatcgtgaccagcggacacaaagaaatgggtgctccgtggcctaccggcatttattcttccaaatgaaaggttaaaaccaccggctttagccggtcagctttagctgcgatactgtgttgtaccggaggtgcaacatggattacagatatggcagccacacggtatttcagattgaataccattttgtgtgggtaacgaaatacagatacaaagtgctgacaggagaagtggcaagtcgagtgcgagaattaatccgtcagacatgcggctcctttgaaatcagaatattaaagggagttgcgagtcaagatcacgtgcatatactcgtcagcagtcctccac

SEQ ID NO: 4137 - DNA, 751 bp, Photorhabdus luminescens
tgacgcctttatatcatatatggaaaacagcaacgatttttgggctataaaagacagggaacatcgattcgtctatgccaatgatactatgctttattacagcggtcttcctaagggttttagcatagaagggaggcttgatggtgagtgtccagcaccgtggtctgagtttgaaaatattatacaagcgagttgtgatgttgtaatgacgagtcaaaaaaccattccagtattaaacaccttgacttatggtgggaaacaaaaaatgatccaaccatttctgaccaatgttacaccgctaatgaaggatggagaatgcattggcattgttggacacggcaaaaaacttgaaatttactccatgtatcattttgaaaataacattcatccagagtcattaacttttggcaaaccaactgatttatttaccgacagagagttcgatatagtattttttgcattgcaatcgctaagcgctaaagacatagcgagaaaattaggtattacctatagaacggtacaaagtaggttacaatttatttaccaaaaaatagggataaattcattaagccagttaaaagaatattgcagaggtaaggggtatgataactatgctcctacccgatttattaacccgaatccctatataactctagcataacaatgaaccactccgtcactgttccattagggttctgcccagcagaatcctacccactttcaaaaaattttttgtttacccgcttttgta

SEQ ID NO: 4138 - DNA, 665 bp, Photorhabdus luminescens
agtgagcaactgttctgtgtgacgttcaccctgtgccattttttcagcgatagatcgcatgatcttgctgagttctggggcgattcgatgttcatcggcggttaaattgttattacgtgaactgagagccaggccattttggtcacgcaccgtgggtactgaaaccagcgtaatatcataagccaggtcggcaatcattttgcgaataagttgtaattgttgaaaatctttttcgccaaaataggttaaatctggctgtaccagattgaacagtttactcactacggttgaaacaccacggaaatgaccgggacgactggccccttccagcatggtagaaagctcaggaacatcaacgtaagtctgatgttccataccatcagggtatatttccttatcagcaggagcaaataccagattgacaccgtgttgatgaagtttttcgcaatcttcctgtaaggtacgaggatattttgccaaatcatctggacgattaaactgcatcggattgacgaaaatagagaccatcacaatatctgcttgccctttggctgtatcgactaacgtcatatggccggcgtgcaagttacccattgttggcaccaacgcaatgcgttttactttctgacgccaggggggatttacggcgtagaactgtacacgta

SEQ ID NO: 4139 - DNA, 750 bp, Photorhabdus luminescens
  misc_feature (735)..(735): n is a, c, g, or t
cttctaccgggccatccagaaatgcttgttcttcagcggttagctgaggccttggatagtcatgcaattttttccagtcgggtttaccgcggaacagctcgccttcccaccaggtagttcctgcatcaagagcttctttttccgtgcgagatagacttggcattactttacggaaggcttttaaggccggaacagtcagtaaggagtggcgcattggcgcaaaattcagcgggaacagaataatggccattggtaacaacatccagtagctccatgcatcaatagcgcccatcaggacggtatagacaaggagcagtaggctgctgagactgagattgactttgtgatagcaaagtatcccaatcaagactaagaatagaataatactcaatgtggtcataataaaagctcctggttaatctcagggtcaggtaagtcatcagaggtcggacctgttgtggtgttcttctctttttagaccaggaaattgcttttagcaatatctttacatcttaattacaatgtagctcacaaactcgcagtgatcaggaacggattaattctccagaaatgtgatgttgtcttctttcaattctcttgatccggtaaactgccatccggcacaacattaaagattacctgaccgaagtgaggagcctatgtatcaagacttgatccgtagtgaattgaacgaagccgcggataccgctggcaagtttttaagtgacgatgcanatattgaagcaattc

SEQ ID NO: 4140 - DNA, 668 bp, Photorhabdus luminescens
  misc_feature (78)..(78): n is a, c, g, or t
  misc_feature (82)..(82): n is a, c, g, or t
  misc_feature (202)..(202): n is a, c, g, or t
  misc_feature (256)..(256): n is a, c, g, or t
  misc_feature (262)..(262): n is a, c, g, or t
  misc_feature (269)..(269): n is a, c, g, or t
tattggctaaaatgacagcctgctgagacaactcatcccccttaagatggggataaccagcgatgctatacaaattanccgntttcaaccagaaattgctcgcttctgggatctgctctgcctgcaacgctctctgttgccacaacatcgcctgatgtgaccactcaaaaacccagttacctttacgatacccaatcacagnatccagtaaattatcatcactgcgctgtgcgtttgtcatggcaatccggcacancacttnttctatntcaaacggatcaatttctcgccaaatccacatcagccggttaatcatacgataccagctaccatgactattaccatctaacgtactcgaattacccgcaattaaccgaggatcgcggtgctttaccaacgtggaagttgcctgatgttattgacttcgccaaaaagtgattctgaaaggttccgatctgccataactaatgctgatttgatctaccttcacaaatgcgtggaacgaatactacacccatatcccaaggttgctctatccaagtatcttgaggaatatcaacactataatcatcaaccaacgtgtgggctgccggatttgcaaatatagtcacaaaatgggctttgggatatatctcacggatggcctgagcagagccttcagtatcaac

SEQ ID NO: 4141 - DNA, 735 bp, Photorhabdus luminescens
ttgccagaatggcattttttgccaagtttctggttgaggctgagattcaggaatatccccaaggttagaatgaacaggctctttttcaagtgcaaatgcaacccggctagcaatatccctatgcaatacttccgtcacatcaccgcgcaatgtgtcacggatcaagtggtaattttcccagtgtttctgcataacagaatctttagacaaaatactaacgacttcactatcaagagtttcgccatccatcagtgcggaaagtttttctctttgcatgccaaagtacccttcagtattgttccactatttttaattttaaatcagtggttgaatgttatcatcaatggcttcccttgcacggaagatgcgggaacgcaccgtacctaccgggcaattcataatggtagctatttcttcatagcttaacccatctaattccctcagcattattgctattcgcaaatcttcgggaagagattcaatggtacggaaaaccacctgcctcaattcttctgacaacattaaattctcagggttcgaaatttcttttaatgcactcgaaatttcataattttctgcgtcactggcatccaaatcactggatggcggacggcgcccttgagcggtcagataattcttcgcagtatttactgcaatacgatacaaccaagtataaaaagcactatcaccacgaaacgaagcccatgcccgataggccttaataaatgtttcctg

SEQ ID NO: 4142 - DNA, 653 bp, Photorhabdus luminescens
acaaatcgtgctggaaatattggtgaaaaaaagaaggtatttctaaataattcatgtgtaaaaccatttactgaactcacaataacattcagtggtactgttgttttgtgctgtcaggattggatggaagaggccattataggagatcttaaccaccaaagcattcttgagatatggaattcaaataatttaaatgaaattagagaacaattaaagaatagaaatagaatcggaatatgtgaatattgtgattttgttggggtataagatgatgaatatatttaagataatgcagaagcaagtatccaaatgttatgtaaaagggaatgactggaattattcgaaacataaagatatatatttacattttagtgatgagcgttgttatgaagtagaattgaaggaatgtgcacaattatcttatataaagaatgcagatagtatcatattgttgccgacactatggggacgatgtgataaatctgagatcttagaagcaattcaaagaggaatagaacaatgcatcaaatttaattctgtattaatggttagtattcaatctaactatagtcatagagaagatattattgatagcgttaaaagcttttgaatgaaaatgaggtttacgacaagttgatattggttcttacaga

SEQ ID NO: 4143 - DNA, 665 bp, Photorhabdus luminescens
atcatccggggggcggtttgcaggttatcgacaaccgtttggcggttaagactggcaatggcatcgcggtgaaaccggaggggcttgcgttaaggctacagcccaatgggggattgatgttggataaatctggggcgttgtcagtggatggtactgtagccgtttcggcacaagcttttaaattgcttcctgaggagacgcggaaacaaattgccaagttgttattgaatgctgagacagaaaacagatgacagagaatagatgacggtgactgcctaatacggcttttgaggacatattatgactgataaagaaatgagttctgttgactcattgaaagcgagttttaagtctggtgttccgcctatgcctgaagcattttctcatttgattgatgaggcatatagggcatatgaaatcattgatggtgataagcgggatggcccgaccgcagggctgggacgagatgacaaaggaaaactagccctcaacactcaccattctggcgggttaaaccttgatcagagagctttggccctgtcactgaagctagaaggtgggctttcttttgatgggggaaggcgtctgaaattagatgccgatcggcaagttcagtttgccgatttttcagttatcgcggtggagcgatggagatccacagctgt

SEQ ID NO: 4144 - DNA, 739 bp, Photorhabdus luminescens
caaatagagctcttaaactcttctactttcatatcagattttggtaaaataagaggtataataaagactcttaactataaaatttaaacttaataggtgtattcatggctctaatactttataccgaatcggaattgctagcagaacttgggcaccgcctccgtgagcaccggttacggcgtaacatgctccaaacagagctagcgctcaggagcggtatttccgtctctgcgctcaaaaaacttgaaggcagcgggcggggcacgcttgagaatttcatgaaggtcgtctttgctctgcggctggagaacgcaattaagtccctgtttatgctacaaccgactagcattgcacagcttgaagccatgaaagcaccagttcgccagcgcgcccgacgaacccaacgttcgtctcggaaaccctcaggcaatggccgcgctcatcaatcaggagacgcaaaaaaatgacgacccaaaactttcaataccggtcactgggccgactacaagtgatctaccgcgggcgaggagaacagtgggtgttaggtcatctggccgaaagtactgtgagtggccgctatttatttgagtacacccatgaagctcttgataatggtatcgaattctcgcccctacaactgccactttctacagagacttacgcgaattttgagcactttcaggactggcttcctggtttcatcgcagattccctgccggatggctggggacggctgctt

SEQ ID NO: 4145 - DNA, 660 bp, Photorhabdus luminescens
  misc_feature (622)..(622): n is a, c, g, or t
  misc_feature (660)..(660): n is a, c, g, or t
ataggcatgaaaggtgtctaaatcatggcgtaatgtccccacgacgcgggagaccagatgcataacaaaagagtagcgatcaacttttgtcagatccgcgacatagcgactgcccggttcacaaatgcgggccaggtcattacgcgccaaatcaactaacattaagtgctcagctagctccttatgatctgttcgcatttccagttcggtccggctatcaagatccgcatccagctcgccggccgcattgcgcccacgggggcgggtgccggcgattgggtagatttcaatttggcgattggatgcatcatatttaagcgcgctttcaggagacgcgccaaacagacagaaatctttgtcctgcatgaaaaacatgtagggacttggattgtggtacttaagtttttgataagcatgaagtggtgccgggcagggtaaaaagaagcgtcttgatggcactacttgaaaaatatccccttggcggatgtattgttgcaactgtgccaccatttctgcatagctcttgtcatcccgattgtatgaaactttcatggttggcagagagatttgttgtactggctcaatgggctcggtaatgagtgccactaatgttttcaatcgntgtttaaggcgttgctcttctgcttgagaatcactgan

SEQ ID NO: 4146 - DNA, 746 bp, Photorhabdus luminescens
  misc_feature (695)..(695): n is a, c, g, or t
  misc_feature (746)..(746): n is a, c, g, or t
agggaaatcctctttcagtaacaccaaattttgtggtcttgcaccgcgccatgaatagatcgactggtcatcatcacccaccaccgtaaaacgagccctttgccccaccaacaatttaaccagttgatattgactggtattagtgtcctgatattcatctaccaacagataacgaatacggttttgccaacgctccctgacttcttcatcacgctgcattagcaaagtcggtttggtaatcaaatcgtcaaaatccaatacattacagctcgccagatgtaaatcataacggcgataacattcagcaaactggtgctcctgagcagaacggaccaatgccaaaacttgctgtggagaaagcagatcatttttccaatttgaaatggtggagatcagtttttgtaatagatctttatcttcctccagtaaatcggctgttaaatctttcaacaaagccatctggtcctgatcatcaaataacgagaaattgcttttcattcctaacgttttgtattcgcgcttaatgatttccaaccccaaagtgtggaaagtcgaaatcatcaaccccttagcctctttgcgccccagagtttgtgctacacgctctttcatttcccgtgcggctttattagtaaacgtcacagcggcgatatggcgaggctgatagccacaagtacggataagatgagcaattntattggtgatcactctagttttaccagaacccgcccccgccaggaccagan

SEQ ID NO: 4147 - DNA, 667 bp, Photorhabdus luminescens
  misc_feature (667)..(667): n is a, c, g, or t
tctttggcttgtttgatggcacgacagatgataaatggggctggttagatccagtcaatccttaatagaactatacccaatggatttcaagagggatcgcgacggcaagggagcgaatccccgggagcatagagaactatgtgaccggggtgagtgagtgcagccaacaaagaggcaacttgaaagatgacgggtatataaataatttaacgggcggttcgttccccgcctgttttgataacacgggagtgaagataatgcctaagtaccgttctgccactacgactcatggccgcaatatggcaggagctcgcgctttatggcgcgcgacagggatgaccgatgcagatttcggtaaaccgattattgcagtagttaactcatttactcagtttgttccagggcatgttcatttgcgggacttaggtaaactggttgcggaacagattgaagcatcaggcggtgttgcaaaagagttcaatacgatagcggtggatgacggtatcgcaatggggcatggtggtatgctctattctctgccgtcacgtgaattgatcgctgattctgttgaatatatggtgaatgcacattgtgcggacgctatggtgtgtatttccaattgtgacaaaattaccccaggaatgctgatggcagcactacgtctgan

SEQ ID NO: 4148 - DNA, 761 bp, Photorhabdus luminescens
  misc_feature (711)..(711): n is a, c, g, or t
taccgctatcagccatcacttgtaataccgtcaatgataaacgaccaccggtaatttctggatataacgaaccggaaagtgtcattgtgtcgttacccggccccagaaattgccaagcaggccgtatcccgatacggctgttaaaagcatgccgccatgactgctgatgttgcatactctggtatggtgtggtcttcaacataaaaacaaataaacccagtgcagccatcataattagaattctcctctatcagagaatgaactgcgtaaacgcgcctgctgtttacgttcccgatcatccaattcgcgcctaaccgctgctgcaatatcctgcgcagattgccccggtgcaccatagatatttatatgatagaccggtgattcactgcgatactctaccatctgccgtttgtctgctttcttttcctgaatctgaggataagcatgaaccggtaagctctgaacatgcaatggtgcggttctggctgcggcagaaggtgccattacgctcaaagaaaatgccgcagcggcagcaagtttggcagtctgtcgtcggctaataacattgacagggccagtgacaatctctggtccatattcacccacaataccaaatcggccagccggaataatgccccctttgtcatgcttgggcagaaccgaactaacattaggactcacattattactggcgtcttttgaaatatcttnctttgaccgcatccagtcagggagatactcagacaatgaagtcagtttat

SEQ ID NO: 4149 - DNA, 768 bp, Photorhabdus luminescens
  misc_feature (749)..(749): n is a, c, g, or t
  misc_feature (764)..(764): n is a, c, g, or t
  misc_feature (768)..(768): n is a, c, g, or t
tacctaatggttgtactagctgattattaggatataaaaatgaatctctacggacttgttgctgatattggcggcactaatgccagattagcactttgcaatttggaaaatggggttattgagcggatcgaaacatatagtgcaaaacaacacgccggattagaatctattatcagtcactatttagcagagcaaaaaacagtagtgacttatgcatgtattgctattgcttgcccgataaacggtgattgggtagaaatgaccaatcaccaatgggcattttctattagtgagctgaaacggacacttgggctagaaaaattagatgtgatcaatgacttcacggctgtatctatggctattccaatgctgacagaagaatacaagcttcaattaggaggaggagaagcggttaaagacaaaccgatagcggtttacggggcagggactggcctcggtgtcgctcatttgatcaaggtagacaagcaatgggtaagcttaccgggtgaaggtggtcatgtagattttgccgcgaatagtgaagaacaagatgcaatattggctgttttacggcgtaaatttgggcatgtttcagtagaaagaatcttgtccggtagtggattggtaaacctttatcaggccattgccattttggatcatcgtcagccggaagatttagaaccagaaaccgtgacgcaacgagcattggataaaagttgccaatattgccatcgtgctctgacactatnttgtgaaattatggngcgn

SEQ ID NO: 4150 - DNA, 685 bp, Photorhabdus luminescens
  misc_feature (658)..(658): n is a, c, g, or t
cacttacccctggggtatgaccatgattaagaaaggtatcagcatctgagtctcgactgtcccaacctgagcggaatagcaaccaaccacctacaggtaaaggtccatggacttcgcaccattgatcgacatgttcacgttcgagtaaaaaatctggggctgttacttgatcagatacatcaattacagcggcaggcgcaaccaagtgtctaggaggtacacttgagacatcgatagaatctttgcctgaccgccaatgaacaggggcatcaaaatgagtccctgtatgctcggacatctggatattattccaataaacttctttgcctttttcgtcataacggcttattttttccaacttaaaaggccaaggttgccctcgttcaggcggcaaacgaatcacaggtgtttccgttgacaacggcgctgtaaggtcaagtacctcaactttcccctgcatgaacttcgcatagattgaagatgtcatagtattaagatttccttattctcattatgggcttaatagacaggggttgaatattcagatgtcgaattcgacatcacctcgtcttcataagcaacctgaagcttacgggtcatcaaaccaggacgcccgtccccaatagactttcggtcaacactaatcacaggaacgatntcagcgagagtgccacaggtgaaaact

SEQ ID NO: 4151 - DNA, 774 bp, Photorhabdus luminescens
  misc_feature (672)..(672): n is a, c, g, or t
  misc_feature (757)..(757): n is a, c, g, or t
ttgataaccaagtttccagcaaggagtttacacctaagactgcattgggttggcaattgacgccagatacccgtttctatctctctgccactaaagggtacaaacccggtggattcaataacattgtctcctccgccaatgatagcaaaccctacaatactgaaacctcagataattatgagctcggctggcatacctcgttctttgataatgcagtgacattagacagcgctgtttactacattcgttcgaaagataaacaaatttatgttggtccgatcggtgcacagtttatacgcaatgtgggtaaagcagagagcaaaggcattgagttgagtagccagattaagccaatgaaagggctgaaattttctcttggaggaagcgtaggcaaatcaaacttcactgatgcaaccgatgcagagaatggcataaattatgacaataaacgtctgccttatgcgccagatgtcatgcttaatgcaagttttgactacttgattgatcaaacattgttacccggtaacctctatttaaatgccggtgcccgctactattcaaaaagctactttaatgaagcgaatactcttgaacaggggggatacaccctctatgacgcatcattaagtttagaaatggcacatggggtgaatgtaaaactctatggcgaanatctgggcgataaaaagtatcgtgtctcaagtttcaccgtggggccaaatacgctcagtatgatcaataaaggcttgaatgttgngctggatgtgagtatct

SEQ ID NO: 4152 - DNA, 691 bp, Photorhabdus luminescens
ctttagctgactggcccgctttgggaaacctacccggagaccagaactgcgaagttgtggttatcggcggagggttgctgggtgcttccacggcattgcatcttgctgaagcgggagtggacgtgattctggttgaaaaggataacattggttcaggagcttctggccgcaacgggggacagataacccctgggctcgcacgctgggaagctaagaccatactggaaaaactttcattcgatgaggctaaacgcttatggcgttttgcctctgttgaagcgatgaatctcttggatgaactccgtgagcgttatcgtttcgaatgtgaccgcaaatatggtcatatcactgttgcagtgcacgcaggccacatggggccgctggtggctaatgccgatgcccggcgtcaactgggagatacggcgatgaaggttatcgggccgcacgaattgcaggaagagtatgtgcgttcgggcatctaccacggagcatatatcgacagtatcggtgggcaggtccagcctctggcactgttgcgtggtctggcttatggtttcgccagactgggtgggcgaatctatgacagcacaaaagtgaagggcatcaagcaggatactggtggcacagccgtagaaactgagcgggggactatcagggcaagtaaagccgtggtgttgggtgtgcatggctc

SEQ ID NO: 4153 - DNA, 783 bp, Photorhabdus luminescens
  misc_feature (696)..(696): n is a, c, g, or t
ttaaattttcacctgccaaataaaacttatggaaatagatagcaccctattaaaaaccaaatgtaatttattttcataagttttatttttaagtcatcatcttaaaaggcaaaatatgtcctcactcaacattctcaccgagaaatttgataataaaaccgccaccattgccattgttggcctgggttatgttggcttaccgctcatgctcagatataacgatattggttttaaagtgatgggtttcgatatcgataaagaaaaaacagataaactcaatcaaggtcaaagttacattgaacatattccctccgccaaaatcagtcacgcgataaagaccggttttgaagccacgacggatttcaccaacatcgcgcaatgcgatgccattattctttgcgtcccaacgccgttaaataaataccgtgaacctgatattagtttcgtgattaacaccaccgacagggtaaaaccgtatttaagggccgggcaagtcctctccttagaaagtacaacttatccgggcaccaccgaagaagagttactcccccgggttgaagaaagcgggttaaccgtcggtgaagatatctttctggtctattcacctgaacgagaagacccgggtaaccccgatttcgaaacccgcaccattcctaaagtcataggcggccacacagaaaactgcttaaaagcggngatcgccgtttatcaacacgcgattgatcaggttgttccggtcagctcaaccaaagcggcagagatgacaaaactgctggagatatc

SEQ ID NO: 4154 - DNA, 709 bp, Photorhabdus luminescens
  misc_feature (590)..(590): n is a, c, g, or t
  misc_feature (643)..(643): n is a, c, g, or t
  misc_feature (657)..(657): n is a, c, g, or t
gctgccgttgtccggtccccacaggagaacgcctcgttcttcaagatgcttgagattatgttgcgttgcttgagctcgaaacatttgttgattcattgcgggtacggcggcaattggggctggggaggccaaacaaagagttgttacgagatcatttgccataccgacgaccaggcgtgccagtaaatcagcagtagccggggcgagaataatcagatcagcccatttaccaagttcaatatgccccatagcagcttctgctgctggatctaacaagtcatcggaaacgggataaccagaaaccgcctgcaacgtcattggtgtaataaacgattctgctgctggtgtcatcactacacgtacttgtgcgccgcgatcacgcaggcgacgtactagctcgggagttttgtaagcggctattcctccgctgataccgagcacaatctgtttgccggaaagtcctgccatcatgattgtccgaatatataagttgcaaggggccaagattttatcacaagagattacagagttgagcagagtctgagctttgattgtaaaaaagaataagtttgcgagcggctacgcagctncggaatatgatattcgcccttatatttaaggcgtggaatactggttgtatcangtgaaacagagcanggagatgaatatatgggaattgatgtcgctgaaatacaggagaaattattca

SEQ ID NO: 4155 - DNA, 746 bp, Photorhabdus luminescens
  misc_feature (741)..(741): n is a, c, g, or t
cagcatgtcactgaatgcgggcagatcgaagaagaagtgctctgtttcacgcatttctggcgtcgcgccggagacagcagaacgtgggttgattagttcagttgggctgtaggttgaaccgcaaacttcacagttatcgccatactgatcttctgccttacatttcgggcagctacctttaacaaagcgatccggcagaaacatatttttctcaggatcatataactgagaaatagtacgattcttaatatgaccgttttttttcagttcgagatagattttggttgataacgtttggttctcttcgctatgcgtagagtgatagttatcatagctcactgaaaagccagtaaaatcctgatgatgctcttggttcaccgttgcgatcatctcttcaggagcaatacccatttgctgagctttcagcatgattggggttccatgagcgtcatcggcacagataaagtgaacctctttgccgcgcattcgctgaaaacggacccaaatatctgcttggatatgttccagcatgtgaccgagatggattggaccgttagcatatggcaacgcgcacgtcaccaataatttttttgcgacttgagacatagtaaggatctgacttccaataagtgaaaaagggagtttgatgttaaccgatcaaaaaaattgtcgctagggtaaggtttaatattaatgagttttatccagtgcgccttgaaacctaaacccttctgaggttgnaatgg

SEQ ID NO: 4156 - DNA, 673 bp, Photorhabdus luminescens
  misc_feature (661)..(661): n is a, c, g, or t
cagccatcgcattgtttgcaaagtttgcgtcttcttgtttgttcacagaagcgatagcgtctttttcgtcagcttcgtctttagcgcgaacagacaagttgataacgcggtttttgcgatcaactccagtatatttagcttcaactgcatcacccacgttcagaaccagcgttgcatcttcaacacggtcacgagaagcttctgatgcacgcaggtaaccttcaacgccgtcagccagttctactgtcgcacctttagcatcaactgcggtaactttaccagtaacaatagcacctttcttgttcacggacaggtagttattgaatggatcttctgccagttgtttaatgcccagagagatacgctcacgctctgcatctacttgcagaacaacagccgcgatttcatcgccttttttgtattcacgaacggcttcttctccagcaacgttccaggagatgtcagacaggtgaaccaggccatcaatgccgccatccagaccaatgaagataccgaagtcagtaatagacttgatcttaccttcaacgcggtcatttttgttgtgagtctcagcaaataactgccaagggttagctttacactgtttcagacccagggagatacgacgacgttcttcgtcgatatccagaaccataacttncacaacgtcacc

SEQ ID NO: 4157 - DNA, 762 bp, Photorhabdus luminescens
cattaacatccgctatagtcgcgttaggagaacgcgcataggtttcacccgtgaccgggcttattaggtcaaaatattcggaacttttagattcaacatactgactattaatgaaatgcctgagcgttggtaccggcatggttacctcctgatggattggataacataaaatataacctataacttagtatgttcaattgttatgtagatgttaatttttcaactaaaaaacaaaaataaaagagtaattaaagacatagatgtaactttcgacactcctgttcaggaaaatataccggccgatctgtgagcaggatcgaggattttttttactggaagaaaagattcgggggttattcctcggcaggattatttacaatcgagctaatatcaaagattgcccaatttgcaacatcaatattaaaaagcgaagtcttattggagaaattacgatggaaaagacaataaaaaatatatctttattcgcaggaattatatttagaggcttgacattatctcatgcagcaattattccacttggtactgtaagctcatgattgatgaagtagcactaagtattttatgctaatacttaattatagttatacctcttacattcaaaatagggtattcaatagaatcacttaatatcttaaataatcataaacattctgagggttggtttgcaagattaaataaaaaccctaattatcaaataattgatttccctgagatagctaccccaaaatgagatcctcttgg

SEQ ID NO: 4158 - DNA, 686 bp, Photorhabdus luminescens
tcagggaaaagtgatactgttgagcaatttgagaaaaaaatagcagagttgttcgaagttgatgatgtagtgtgttgttctagtggaacgagcgcacttattgctagcctaatggctgaagacatttgtgctgatgatgaagttttagttccgtgttatacgacgatacctacaacgttcccgatcctatcagttggagctaagcctgtatttattgataccaaaacgtcacatacaactgaactatcgattgacgatttactaagtaaaataaatgataaaactaaggctataatagctgtccctctatggggatatccagtcaattatgatgagattgctgaagtttgtaacagtcgaggtatcattgttattgatgacgctgcgcaagctcacttcagtacatttaagactggtcgtctggttggaactttctctgattatggttgcttctcgcttcatgataagaaaatcctttctaccggagaaggtggctttatcattccttcgtctcctcaaagaactaagcgtttgcgagaaatagtcaaccttgggaaccttaatggcttgtcatttggcttgaatttcaagctaggttcactccaagcggctttaggtatctcaagatgtacacgagtgtatgatgaacttactattcgtagagaaaatgccgagaaaatcaagga

SEQ ID NO: 4159 - DNA, 740 bp, Photorhabdus luminescens
  misc_feature (457)..(457): n is a, c, g, or t
  misc_feature (659)..(659): n is a, c, g, or t
atcacctagtagagtgatgcggtgatattcaccgccgtggacaaaatcgaagtccaatagataatcagtatcaacaccgtgtgtacgaacacacagaaccggttcgtacatttggcgctcacgattttcatggaggcgataactgtagctgctgccgttttgttcactgtcattcaaacgggtgaccagcatttcaatccattcttcaactttcgccttatcagacaatgtttcttcggtcagattcggatgataaattaggctattcaataaacttagcggatacaaacgttccatgcgtttaatgattttttgaacaccattaaattcggtcactaatttttctagcggttcgcctctcagggctggtacgtgctcattggtgtaaagtgaggcaccatctagtgcaatggatagttggtactcatccattgcttcatcatctttaatatattgntcttgtttgccttttttgactttatacagtggcggctgagcaataaacacatgaccacgttcaatgatttctggcatttgacgatagaagaaagtcagcaagagagtacgaatatgagaaccatcgacatccgcatccgtcatgataataatgctgtgataacgcagcttatctgggttatattcgtcacgggcaataccgnagcccaatgcggtgatcagggttgccacttcctgagaagagagcattttatcgaaacgcgctttttccacattcaagattt

SEQ ID NO: 4160 - DNA, 653 bp, Photorhabdus luminescens
tggtgacgttggtcccggcaggatgctaaatcccatggcgattgtcgaactcgctgaacaacattttcaagcaagccaagacttagctcacctaaaacttgctattaccgccggaccaacccgtgaagcattggacccagtccgctttatcagcaatcacagctccggcaaaatggggtttgctatcgcccaggctgcggcaacacgtggtgcagaagtcaccctgatcactggccccgttaatttaccgacaccaccgggagtcaaacgaatcaacgtcaccagcgctctggaaatgaatgaacaagcacaggcagtagcgggttcacagaatatcttcattggttgtgctgcggttgcagactatcgcgcctaacagattgccgaagaaaaaattaaaaaacagggtgatgagatcacttttaccctgatcaaaaacccggatattgctgccaatgtaacagcaatgcaagaaacccgccctttgtggttggatttgcggctgaacccagatgtggaagaatcgcacgagaaaactggaccaaaacatttggatctgatttgcgcaatgatgtatcccttactggccacggtttaacagtgatactaatgccttaccattgttccggcctgatggagaaattcccctacct

SEQ ID NO: 4161 - DNA, 742 bp, Photorhabdus luminescens
  misc_feature (724)..(724): n is a, c, g, or t
  misc_feature (742)..(742): n is a, c, g, or t
tggcagtggtgcttgtgcagcggtagcagtaggtattcagcagcaattgctcgacaaccatgttcgggtagatttgccgggaggttcactgtttatctgttgggatgggccgggaaaaccgctctatatgacgggaccggcgatgcacgtttatgatggcacaattcatctgtaatcgattctgttttgagctgcggggcatcggagatggagaaaaaagaagagcagttaagcatcaatgacatacttgatgatcagactgttgtggattatttattggaaaaccccaatttctttatccgtaatgcatgtgtcgttgaacagatgcgggttcctcacccggtgagagaaacgatttctttggttgaatggtatatgagccgccagagaacgcgtattgcttatctggaagaagatataactctgctcatggaacaggcgagagtgaacgaacaactgtttgagcagttgcttaaattacttgttaatttggttgcggcagagagtttgcaagatatgcttagtcggttaagtttatgggctaagaatatgggactaaatagtgccagtatccgtcttttcagtgataaatggcatattggtgcaccacttgatgcgcctgatttagcgctttctcgcaatgcttttgaaccaatccgtattcagcgttttggtaataaaaaccactatctcggtatgctaaatgggccggaaattctattgntgttgccgcaagttcggn

SEQ ID NO: 4162 - DNA, 661 bp, Photorhabdus luminescens
acggatagcatgattaattaaacgatcacgcatcatacgcccgtttacataacaatattgaatatcaccgctcgcctcagtattcatcgggtcaacaacccatcctttaatcgataaatcgtcgtgctgccaggaaagagaaagtgcccgttgcataaaagcggtaccacaaatggagaccaaccgccgctcatactgtgattcatcttttgccggccggtattggcgcaccaatttaccgttatggtgcaaattgattaatacatccaaacgcgccaacgcaatgcgtctaacgacttcatcaatatgaccaaattccgttttttctgttcgcagaaacttgcgccgcgcaggagtattataaaagagatccaatacttcaacagtactgcctactggatgtgctgccggcttcacggtcactgccatatctcgcccttccgcgtaagcttgccaggcttcgtgctgttcttcggtacgggaagttaatgtcagacgtgaaactgaactgatactcgccagcgcctctccacggaatcccatactgataatggcttccaaatatcaagggtagcaatcttactggtagcatgacgagccaacgctagcgcaagctcctgatggttgatgccacagccattatcacggacaccaataagtt

SEQ ID NO: 4163 - DNA, 750 bp, Photorhabdus luminescens
atcggtggcagtaaattgtccccctttgagcgacagatattccagccagctgttaacacgaatataagaatcatcggttattaatgaattgtcttttgcgacggcaaagacaggtactgctgttgcaccggactgaacagagagtgcgggtgaggcgtcctcttcgatataaacgccgggataggttggtaccgttggcatgttgcctccaattattgtgcaatattctgagtagacagcttgataaatgaatcttaagccgcttgaatggtcactcgatctgcggtcagggtaatttcctgcacggcaacttcgttgctggtggcatcaaaagaaggagaaattaatgaggttgggaaggcatttgccacgctccaggtcattaaaatttcagtgccggcttcgttggttaaactgattgaaatatcttttttctcaacctgattaagctgaatagagttaatccagtcaaaaagtttagtatcgccagagaatacccctttacgcagtgagatattaatcgcctgacgttgaccgggcattttatagtaattgccggtaccatctttgtattctatgacatcatgagaaatatcgaggccagaaacgctgttaaaagggatttgctcatcaccgatcgagacaacaaatcggtaagtaagaatgggatattcaacagcaaatttgttctggagttgtagacatgattttttccttgaatgtttacatttgaaatataagaaaaacatt

SEQ ID NO: 4164 - DNA, 669 bp, Photorhabdus luminescens
aataacttcaccaacaagcccgctcattattactgccaaaggtggaataaaagtctccatttctaagcaagatatagaaaataagatcattaaagcgccattaattgaaacacagccagagttattaaactggggaaaacatcgtaagatcctgaactactatccggtcagcaataaattgccggcttgctatggattacaaacctacgctgagacccaacaacaaatccacttgcatcaatttatgctgccttttgaacaaatgctagctaatggctgcgctgaacttgccatcttgccgaaactgttagcctttaaacaacggggaaatgcggtatatggcgcacaatggccttttaaagacaatactgttggttataaagtccaccagcaaatcatgcctaatttaatcaaacagctaaataatgatgcccaaatcaataatgatgacggtatgcattggcaaaactatgcaaaagaattgttaatcctgaattatttgctggagtattttggtacccatcgcgcagccaggccacttaccatagactttctggattttctctctactcaacgtggttatttagcacagcaacccgaattaacctatcaacgtaataatatccgtattgatcaagtgtcagcactacaaaaacggattgccgcccg

SEQ ID NO: 4165 - DNA, 767 bp, Photorhabdus luminescens
  misc_feature (764)..(764): n is a, c, g, or t
ctgatgatgttgatgttgccatattttatggtcgtggaaattggccggggttacgcactgatcgtctttacgcagaatatttgcttcccgtttgttctccttcgttactgactggagaaaattctttgaagacccccgcagatttggcgcgtcatacgttgttacacgattcttctcgtcgtgactggcaagcgtatgtgcgccagcttgatatgcagcagcagataaacgttcagcaaggaccgatatttagccatagtgcaatggtgatccaagccgctgttcatgggcaaggtattgcactggcaaataatgtcatggctcggactgaaattgatgcggggcgcttagtttgcccatttaatgatgtgttagtgagtaagaatgcattttaccttgtttgtcatgacaatcaggctgaattggggaaaattgctgcattcagacaatgggttttggcacaggcagccagtgagcaggaaaaattgggctttattaccaatgagtaagagcggaataaggtattcgagctgtaaaagctctcagatagaagaaaaaggaagataacagtgaatagtcgcctaatgcttatctttgctggcttaagtgggtttttctatgtggcgtttggtgctgtaaggtcacatttattatctccgatgatggaaaaatatcagataagttggattgatcttggtctgaatatcagggtattcacactctggcaatgatggcgatgtctggcatggctatgccgtaagtgngct

SEQ ID NO: 4166 - DNA, 692 bp, Photorhabdus luminescens
  misc_feature (652)..(652): n is a, c, g, or t
  misc_feature (664)..(664): n is a, c, g, or t
cacaaccttcagcctgcataagagggcctgctacaccaacaaaacgggcattaggtactttagcttttaatgcacgaattaaacctgctccaaggatatcaccggaagtttctccggcgattaatccaatagtcaacggacgcagactatcaatagaagaaatggtagccaaaggagtatccttcatctacttaacggacgatgccgcgggtagaatttgccagaaaatcgctgaagatttttacatgctgattattttcagccagctcagcaatttcttgttgtgcttcttctaacgtttttccattacgatacaaaatcttgtacgcatttctaattacattcaatgaatctttatcaaaaccacggcgtttcaagccttcgacattagtgccaaaaggtgttgcatgattcccctgagcaataacgtatggcggaatatcctgtaccacaccggaacacccgcccaccatagcatgagagccaatctgacaaaactgatgaatcgcactcataccaccaatgatgacataatcacccaagataacatgcccccccaaagtaccattattagcaatgacacaacggtcaccgacaatacagtcatgagcaatatgggcattaaccatcaacaaattatcattaccgattntcgttacaccgncaccctgcacagtgccacgatgaatggt

SEQ ID NO: 4167 - DNA, 815 bp, Photorhabdus luminescens
cctttcgagcacggtacccggggctcctctagagtcgcacctgcaggcatgcaagctttggctaagattcgtgcatctcaatttgattttattatctctgattggaatatgcccaatatggatggtttagagttactaaaaatcattcgtgaagatgcccaattggccaagataccggttttgatggtgaccgcagaagcgaagaaagaaaatatcattgctgctgcgcaagccggggccagtggttatgtcgttaaaccttttaccgcagctactctggaagaaaagctcaacaaaatatttgaaaaactgggcctctaaggagacataatgagtgtaaatccagtcatgccaagggatgagaccattagcgccagtgaaattatcagccgtatcggccagcttacgcgcatgttgcgtgatagtttacgtgagttgggattggataaaactattgctcaggcggctgaggcaatacctgatgcaagggaacgtttggactatgttgtgcagatgacagcgcaggcggcggaaagggcgcttaattgcgttgaagcggcgcaacctcgtcagaatgagttagagtcatcggcaatatcactgaaaaagcgttgggatgagtggtttgaaaacccagttgagatgcctgtggctcgctcgttggttatagatacccggaattacctcaatacggtacctgaacatactgctttcactaacgctcaattgctggagatcatgatggcgcaagactttcaggatcttaccggtcaggttatcaagcggatgatggatgttattcaggaaatagaaaa

SEQ ID NO: 4168 - DNA, 763 bp, Photorhabdus luminescens
  misc_feature (707)..(707): n is a, c, g, or t
  misc_feature (763)..(763): n is a, c, g, or t
aggccaataaatcagaacagcaagtgtcgtcaggccaatcagcgtatcactcacatacagcgttggcagagcttgaaacagagccacaaccttattgatataattctctggcatatgttccaattgcagaccaaaaaaatcttttacttgcatggttgcgatagttatcgcgattccagaagtaaaaccgagtgtgacgggtagcggaatatactcgatcaatttaccaaagcgggctaatcccatcaccagcaaaataatgcctgacattaatgttgcaatgagcaaaccactcagaccaaattgttgagagaccggatagagaatgacaacgaaagcggcggtagggccggaaacactatagcgtgagccgccggttatcgcgataactatcccggcgatagcggcggtataaagcccatactgtggcgcgacaccactgccgatggctagcgccatagcgagcgggatggcgataataccgacagtaataccggcaataatatctttagttaaacgagcaaaagagtaagattccttccaacaagcatcaattacagcactaaacggccgtatgccggtcattctacgagttttcatctgtgcataaaccaaaaatatagagggaaaaaagttataaggtcgttacagacaaattgcaagggccaattacaaagccgaattataaaaatagtgcttttagttanaatgatagtgccatagagcaaacttaatggtaatagcttaacggcaggaaagtaan

SEQ ID NO: 4169 - DNA, 666 bp, Photorhabdus luminescens
aacgctaatgcattagcggtaaagggatcggttgacgatgtttttataatacactgattcttggttaaaattgcgcgtaatatagacatgatcccagataatggaacattacctgccaacagatgtatagacttacctttcggaaaagccttaatataactttcatcctgaggtagccattcatccatgatatggcgagaaccaagttcattttctacaacatcataaaggccacctttagaacataaaatcatagatatccagttggcctctaacttggccattgcttctgaatatcccatatatttttttaaatcacgaatgtatgtcctgcgtcttgaatatttttcatttttccatctttgccctacccgatagagaaaattgacaatattatgcaaccgtaatttattattttcattataatcaataatggtttttacatgagaattatttaatattgggcaggaaacactatgatcacccaaattaatggattgcactaattatcactttcggaaaaatttcacctgcccgtaataatgaatgaaattttttagtctattagcctccatttaatggggaacttaaacttaagtattgttaatcatctgcaaactggttgtacaatatttggttcttgattttatggtacaacataaaata

SEQ ID NO: 4170 - DNA, 767 bp, Photorhabdus luminescens
  misc_feature (624)..(624): n is a, c, g, or t
ttccaggtcatttagccgtcaacaatcagttgaaagcctttatggaagaaggtggcgaagtctatgcctgccgttttgcattacaagcattttatggtcaaaccgaaaaagcgcttattccgggaattcggccaattaatccattggatgtgatggatttaagactgctgatgcgtcgcgacaatgccttagtcattgatacctggactgcctaagtaaacataaaccacgaggggataaggttatgaaccgaatcattaaagccgccgcagtacaatgtagcccagtgctttatagtcaagccgcaacagtaaaaaaaatctgtggcattattttagagcttggaaaacagggagtgcaattcgcagtctttcctgaaaccgtcgtgccttattacccttatttctcctttgtacaaccgccatttgctatgggtaaagagcatttaaagctattaaatgaatcggtggttgtaccttccgaagcaactttagcgattggtcaagcctgtcttgaagccaacatggtggtatcgattggcactaatgaacgtgcgggcagtacgatttataacgcgcaactgttatttaatgccgacggttcaatcattcagcatcgccgcanaattaccccaacttaccatgaacgcatggtgtggggacaaggtgatggcagtggtttacgtgccattaattctgcggtagggcgtattggttcgctggcctgttgggaacttacaacccgttgggacgttttgcttaatgcag

SEQ ID NO: 4171 - DNA, 689 bp, Photorhabdus luminescens
  misc_feature (345)..(345): n is a, c, g, or t
cttctaccgggccatccagaaatgcttgttcttcagcggttagctgaggccttggatagtcatgcaattttttccagtcgggtttaccgcggaacagctcgccttcccaccaggtagttcctgcatcaagagcttctttttccgtgcgagatagacttggcattactttacggaaggcttttaaggccggaacagtcagtaaggagtggcgcattggcgcaaaattcagcgggaacagaataatggccattggtaacaacatccagtagctccatgcatcaatagcgcccatcaggacggtatagacaaggagcagtaggctgctgagactgagattgactttgngatagcaaagtatcccaatcaagactaagaatagaataatactcaatgtggtcataataaaagctcctggttaatctcagggtcaggtaagtcatcagaggtcggacctgttgtggtgttcttctctttttagaccaggaaattgcttttagcaatatctttaaatctaaattacaatgtagcttacaaactcgcagtgatcaggaacggattaattctcccaaaatgggatgtcgtcttctgtcatttctcttgatcacggtaactgccatccggcacaacattaaagattacctgaccgaagtgaggagcctatgtatcaagacttgacccgtagggaatag

SEQ ID NO: 4172 - DNA, 767 bp, Photorhabdus luminescens
tactcgatgtgttacagaaatctggtgctgaagtcatgatgttacgcgctgatgttgctgatgatgcggcattgactaaagcactggcacagatgcgggcaagatttggtgctatcaacggtgtgattcattcagcgggtattgaagccagtggattgctggagcatggcacgtcgcaggactggcggcatgtgatggcagcaaaagtaagtggtacacagcaattgatgacggcgataagtcaggaccctctcgactttgttctgttgtgctcttcacttgcctcattggtaggtggaatgggtcaggcagactacgcggcggcgaaccgttatcttgatgccgtggcgcactattggcgacagcaggctataccggtaacgtcagttaactgggatacctgggcagaagtggggatggccgtggattatgctgcacgccgtcaagaaagcgtgatcggtctcagtaatcaagagggctgcgctattttcgatctggcgatcgctggaatggaagcacagatcgttgtcaataaatttccccctgttcagcgcacacaattacaggatttatcagtgatatctgattccgccagcccagaggaagcggttcgtcaattgtggtatgagctactgggcgaagagacgattcacttggaagatgatttcttcgaactgggcggtcattcactgttggcaacgcagatgatctcccgtttgcgtgatcatttccagcactgcctgacgctggcggagtttctcgaacaa

SEQ ID NO: 4173 - DNA, 775 bp, Photorhabdus luminescens
  misc_feature (739)..(739): n is a, c, g, or t
  misc_feature (759)..(759): n is a, c, g, or t
  misc_feature (775)..(775): n is a, c, g, or t
aagcttttttatacaaaaaaggaagtcaagtacttgccagctacaatatcagtggtacgacattaagcaatgatcttggtttgattgatatctcgtaatacatacaaacccaccatatttaaattgtccccctatgtacggattgaagtccaacatttgggggacagttcatgcttgcactctctcacgttccaagcctgagtacacgtttatctggcgttgctcctaatgtttcagtcacccttctacatgtacgccatcacatcaaaggtgtgttactgtttatagttatagaaaaattcttcttcgtgatttcagttacaaaaatccctttggaaaaaaatagttctgttcatcttcaataaagtactgttattttagtatagttatatcttcttatagagctccggtattaaatcattacctattattcggttggaaatatagaggtgaaggcttgagcgacgttgtattatcgaaaaaccatattaatccctttcaatctcagctggaggaacttgattcaaaattagttcctattgagggagaggctccttcagagttaaaaggtactttctttagaattggtcccggtcgcctgcataggggagacgaatattataatcatccatttgatggggatggaatgatatttaaagtaacgttcagtgataatgggatattctatagaaacagacatgtgttaacaaaggaatacttaaaagaggaagaagctcanaggttactgtatcgctcggntggaaccgtccccaan

SEQ ID NO: 4174 - DNA, 743 bp, Photorhabdus luminescens
  misc_feature (742)..(742): n is a, c, g, or t
ctgagtggttatccctctcctgttacaaatctgcctgcaactttccctgagttattacaaaaatcgccccatactcatcctgttaattcaccaataccccatgatttaaggaataatgtttcccccagtacggttatcgctaaaactaacgtgacactgacagccaaagataaggtgctgtttgctggagattcaatgatgcagggtatcgccccccatctgaaacgtcggctctaccaggattacagtatttcaagtattaatctcagcaaacaaagtactggacttgcttatcccagtttttttaattggccggaaactatcaataaaacactggaagccaaccatgatatcaagctggttgttatttttttggggccaaatgatccctgggatatgccaccaaaacatggaaacatctacctgaaatttgccagtcctgattgggaaaacctctatcgccaacgtatcgaaatggtccttaccgaagcacgtaaccacggtgctgatattatctgggttgctcctcccaatatgcgacagaaaaaactttctgccaacatgaaatatctgagatccttgtatcaatcagaagtcacgaaagccggagaaatctatgtttctgttaatgatattttcaaatatcatgcacatgattattccgattatgtcggcgacaatagtaacaaaattaaactcagaagcggtgatggtatacacttttagcctgaaaggccagcana

SEQ ID NO: 4175 - DNA, 658 bp, Photorhabdus luminescens
  misc_feature (556)..(556): n is a, c, g, or t
tacccgtaccgcccgcagagggtgtgccggggaccattccgcaacccttgacaaaaaatccaccgcttctcagcacttcccgctggtcgtttttacccagctatgaagactgggtcgtcctcgggcaggaggtggcgggtctggccgaaaatgggttgaattatgtccgcgacagtactcgggagcttcttgcccaatttggttcatggctcaatcaaaccggcaagtgggtgtgtgaagagattattgacccgataagccatcaggtcagctacgctttttcctgggctaatgaacaaacgggaaaaatcgtgacttggacggagagtgagataaaagcccggtggcagacggtgcaacagggttcagacgtcaccctggaagagcttaaaaacattagctggatgcagatatcaaaagaggtgggggaaggcatgctggaaatggtggtgattgttgccggagttgccgttgttatcctttgcacccttgccgtcgctggcccactgattgcactggtggaaaatttagctgccgctgcccgagttagcgccgncgcgttagccggcgtcctacaatattggcgagtgtgacattcgccaccgcttcataattaacggagagaaaatatggaaccttaaatactttgcccagttga

SEQ ID NO: 4176 - DNA, 750 bp, Photorhabdus luminescens
tgcacgactgaccatcaacgttaacaaggcgcatttcaacttgcttgcccgggcattgccccaattgttcaatgataacaatcgcggctggctggaacaggccaagatcatggggccgaaaaatctgggcagccgtaccgaccaagctgtgatctacctttccaaagccgggatcgagcatgctcaaaccatcagcgaaaagcttagcgaactgttaccggcgacagcctttgtcgaacacaccccgacaggtatgtatcgcgtgggcaagggcatttcctactctgaaacggccgcgggcggatcgagcagtcacggtcagtcccgggcacaactgattgcggcagcaggtacacagtccttgctgaccgatattccaatcgagaagaccctgacgcataccttgcagacacgcgggtacgatgtacacaacccggcgttgctctcacaagcactacgggatagcgagctcaaggggacgctggcaccaatgagtggcgattctgagcctcgtcaggtcagtgccaatatccatcagttcgccgccgatcctgtgttgttcgccaaatccaacactatcaataccgagacattaatcaggtcggggagtttcccagcagaagggaacgcccagctagtgaaaatcgaatcaggcttgtacgagctcgaatacactgatcgaagcgctaatgatgatgtagcagcaggcgctaacagcatacccgcgtattttctcgactacgacagcgc

SEQ ID NO: 4177 - DNA, 668 bp, Photorhabdus luminescens
  misc_feature (525)..(525): n is a, c, g, or t
gttttaatggcaaaaattttgttgttggtgatgctgctgattttgactggtcacaggtacagctcgctttttttgtggctggattagaggctacggcacaatatgttgaaaaagcgacagaagaaggttgtttggttatcgatagcagtgggttgtttgctatggagcctgatgtacctttagttgttccaggggtgaatcctcatgttttggcggattatcgtaaccgaaatattattgccttagcagatagtatgaccagtcaggtactgacagccattaaaccgctggtggatgcggctggaattgcacgtttgcatttgactaatctgttttctgtttctgttcacggcaaagcggccgttgatgaattagctggacagagcgcccgtttgcttaatggcattccaccggagccaggtcatttcagtaaacaactggcatttaatcttttgccgttgccaacagaagctgaaggttctgtgcgtgaagagcgtcttcttgtggatcagatacgcaaaattntacaggatgagggattacccatttcagtgagttgcgttcagtcttccgttttttatggcaatgctcaagtagtccatttggaaacattgcgtccggttggggtggaagaagttcgagaagattatagcggatggttgatataa

SEQ ID NO: 4178 - DNA, 744 bp, Photorhabdus luminescens
  misc_feature (527)..(527): n is a, c, g, or t
  misc_feature (725)..(725): n is a, c, g, or t
caatttctgcctatccaaccgagaacaatttacgtacccgccatactctcaatgatatccggggagattcagcagtgatggaacatgtgcgcaacactattatgctatatgcccgttcgcctgccacagtgctgatacagggggaaagtggcacagggaaggagctagtagcacaagccattcaccatgaatatgccctgcggtatggtcaggttgcgggtaaacatcaacgtccgtttgtcgccgttaactgcggtgccattgctgaatccctattggaagctgaattgtttggttatgaggaaggggctttcaccggttcacgacgtggagggcgtgcgggtctttttgaagttgcacatcgaggcacgctatttttggatgaaattggtgagatgccactgccccttcaaacacggctattgcgggtattggaagaaaaatccgttgtcagagtaggaggacaccgccccattgctgttgatgttcggataatttgcgccacacattgcgatttggatacctgngttcaagacgggcgttttcgaacagacttgttctatcgtctgagtgtattgccgatcaacattccagccctcagagaaagaggtcacgatattggtatattagcgctggaatatctgcgacgagcatttgctgcattaaatttgccggtatcacaatcaagagtgcaagagcttgctacctgtcaggaggcattgcangcctatcattggcccggca

SEQ ID NO: 4179 - DNA, 666 bp, Photorhabdus luminescens
  misc_feature (639)..(639): n is a, c, g, or t
tgcagaactgtaaggagaatcagcggacacctatcctgctgattgatggtattggttcaatgaatggtttaattccggttgcagaattaacgcgacagttggctgctgctggaggctatgtctatgtagatgatgctcatggtatttccattatggggcgtcatggtgcgggttatgcttttgctgcacttgaccatattttgccatccaacctcatacttgcaggttcattatccaaagcatttggtggtgccgggggttttgtggtggttgcaggtgccgatgatgtcgaagtgatcagtaccttagcgaatcctctggtttttggtcattcgatcatggtgccgatgttggccgctaacgttgcctcagcaagacttcatctcagccttgagatagacatccggcaagagcagttatggaacaacatcaatctgtttgattctctgatggagaacagtttgatgaatgcgggtgtgcaatctcccgttcgccgcgctttattcgaaaatgaagcggaaaggccttgaagctgctcgtttgctgcgtgataacggcatcttatttattcccggattttatccactggtcccggatggcaatgcaatgttacgctttgctttctctagtgagcatcangcaggtgaaataagcagctagcaaata

SEQ ID NO: 4180 - DNA, 744 bp, Photorhabdus luminescens
aagcttctgcaacaaatagtaataataaccacccgacacgcttacgccataatgttattgggctggtactcagataaggccgctccagaggtaaagttgccccctgcaaatgagcatccaacgtattttcatcttcaaccaactcagcaatatcctgcgatcgtagtaccccaaccaatttaccaaaatgggtaaccgggacactatccataccactgtgatttatcaaattataaacatcatgacgcgactgttccggtgatacggaaaaatagctttgcctcataatatctgacacaaataaatcatcggctacagttaataaccctttcaccggtaatatgccattaagatagccttcagcatcaataacatataagtaagttgggatctgctcaccttcaagctgatcaatcaaatgactttttaccgacaaaacagaatcagcaacagatacagaaatgaaacattggctcatatatgcgctgaccgttgtctctgcatttgtcacgcgatgatggcgctgctgtgagcatttattgcattaatagaatgattagcaatcgctaatgcatgccttttatgctggcatgtgactttgatgatgttgggccctattactgtgggaacctgaaacagcgtcacataggggcgaaaccctgagagagaatggcacgacgttgtgtacgagtctggcgtagcctacgcaacgtgtgctggcgataggaaagccacttgagataa

SEQ ID NO: 4181 - DNA, 646 bp, Photorhabdus luminescens
  misc_feature (444)..(444): n is a, c, g, or t
gaaaatggaagagaaccagcagaagattaaagaagctgaaaattctgccaaagaggcgcagaaatctggattgttttctaagatctttggctggattagtgcaattacttcaattgtgatcggcgcgattatggttgctaccggtgttggtgcggtagccggtgctttgctgattgtcggaggagtgatgggggtagtctctcagggactacaacaagcagctcacgatggtttaatcagcacggaaaccatgaaatggctagggccagtcataacagcgattgagattaccatggcggtggtggcggcggcagccactttcagtggttttgctgccggtttgattgcgaaactgggccgctaaaatgggcagtgaacgtggttgtatgactcgtaacatcgtattcaatgccgtcgtctttgctgcaaacgcctgttcgtccnggttgagatacacgtttgctgccttgagattgatttctttcgggccgatgttatcgttaggcgcaagttaggtgtggaagccgttggggtttccggaaacgagctggtgctctgtgtttcctgtgtatgggtcgccacaaggcttccttgtgatatgcgctctgccccctcatctgtgttattgcctctcaatcgcctgttt

SEQ ID NO: 4182 - DNA, 757 bp, Photorhabdus luminescens
aagcttaaagcacaccctttctgtgccctcgtggttgaggcgacgtaaaatctcaacaagtacaccaggatattgaccatattctctgctcattatcccgacatcatcggtaacaataaatgccggataactcgttgatgacgcatccatataactcatcaaacccggcattccatcaggtacaggtttcaatgtttcaggatcaagtgctcgcgcatatacccacggcggaacacgtttacgttgcatttcatcctcaaagaaacaagtgttgagttcaacttgattaaatatatcgcggatttgactaatattattgaggttgaacgtgtcgaataaaagatgattgaaatcatcgcgttttagggactctttttcataacttttccagccgccccccgttatgatataaaggtttttatccccataaaatgagatatttttatctttcatatactggcagagcaaataaataaagtatggtgagccgataagacaaatatcttttccttgattttttattcgctcaaggctattcaatgtcttaacaaaatctattcgttcttcattacggtaaatgtcgtgggatataataattctaccaagctcataacatatttaaaccaaatgttatgagcattaaatctatctggccctaaagtgaccactctatttgatgatcaaaccatctaccaacatatttcatggcctaactcacagagccttagagtctctaatactaaggctggtacgccca

SEQ ID NO: 4183 - DNA, 668 bp, Photorhabdus luminescens
tagagcaaaaaatttcaggtatttccagtattcccgttggctctcctattccttggccgttgtcccatccaccttccggttatttcacttgtaatggttccgcttttagtagatcacagtatccgaagttagcagaagcttatcctgatggcagaatacccgatttaagaggcgagtttattcgtggctgggatgatgggcgaggtgttgatagtggccgtgttattttaagcgcacagactgacaacacaaaaagaatacaacttacgaaaggactccctgatgggcaatttctttctagttatcaaggtcctgtagatagataccagttcccgctggggcgtgatgttcttgagagtgccacctgtacatcaattgctaacaatacaggcggtcatgatacccgcccccgtaatatccatttaactatatcgtaaaagcagaataatatcctaaaggtagaattataatgacacacgaaaatattttatatactgaaaccgctgtattaggtgaagacggattagcaattcaagccggctggataaaagttatcatgctaattcctatacgagagaattctctgcctctgattccaaaatgttgcggaaagggtgggtttcgccgcgcattcttatttggaccccccaacctggccgatttgatgt

SEQ ID NO: 4184 - DNA, 758 bp, Photorhabdus luminescens
aagcttggaagagataacgatgatcaaagctaaattaaaattccgactgcataaaacagctattatcttgatttgcattgctttattagtatttctaatgcagggcgtttcttatttcagccgttctcaccaacaagcccagatggatcaatttgaggaattggcaaaaaccttggcaaaacaagtcgcattcagcttatctgattatatggagagtggcagcaaagatcttaataatgagcggatactggctaatttgcatcatctgacgacaaacagccgcatacttgatgccagtgtttatcttaacaatgggacacaggttgcccatagcggagaaaacgtctcggtgcgggatcgtctatctttggatggtaaaaaagcgggcagctattttaactaccagatagtcgtccccatcccaggaaaagatgagccaaaaggctttctgcgcctgacgctggatacccacaaattggcaactgagtccaagcaggtggataacacaactaacttactccggatcatgatcttactcgctttagcaattggttttattctggcacataacctattgcaattaacaccaagtcgatggcaacaatcgccttatttactgacagccaacagtaaatcaagtgcaaatggagaagaagagaaataaagcgaaaatttcttactaaatcattttgatatcgaaatcaatataccttatggatttcaagatgcatcgcggcggcaagggagtgaatccccgg

SEQ ID NO: 4185 - DNA, 670 bp, Photorhabdus luminescens
  misc_feature (420)..(420): n is a, c, g, or t
  misc_feature (487)..(487): n is a, c, g, or t
ttcacgatagcctgttgagggggggatttcccccctgaatttacagttatgatacgactaaacttgtgtcataacgattgcggacataattgcggacataaatagtagttttaggccggaaaactcagtgagccttcttcttggcttctttgctttttgccttctggtgtgagcgttgtttgggggcggttttgccagatttcttctctgctttggtattttccatatgggaagacgtcgccttggtattcgaagattggggggcgggtgtgctaggtgcagccaataccgcgccagagaataacagtgataatacagttatggataagcctaaacgtgtcatgataattttcctgtgttttaactttgtttcacttgctggaatacattttgcgcgactcagtaagctacttgctattncagatttgttttaacgcacagtgagtatacgggcctgatcattaattcagcaatttaagataatgcntttttatagttttttataattcgttgaagaatcgttgaagtttttgggcataatttgcctgataacagagggcgtttatttaaagcggtgggttttctattgacatgtatactccggtgctcctattcactgttcatccataggcaggtttgcacaagcggtatttattaacataggttaatc

SEQ ID NO: 4186 - DNA, 756 bp, Photorhabdus luminescens
cctgcactatggcaaacatggactttaccttcggtcagtttagtcagtacattcagaccatcaacaaaagcctctttatcggtagcaataatcacctgtgaatttgcagccagaggctgagtatccatcgcggttacaaaaattgcttttggcgaggagccgggagcaggacttcggctgtaaggacgggtacgtagtgcagtccataacccggaatcaatcagattcttttccacttgttctcgggataattgagtaaattgggcacgatcataacggtcaaaattaacctgttcgtctcccgttatctcaatcacaattgactgcaaaatacgttgttcaccacgattaatcgctacaacctgcccacaggctgggctggtgaaaaccacacctggattctttttatcttcaaaaagaatctggcccttcttaacatgctcaccttccttcaccaacatagaaggacgcattccaacatactcttcacccaacagtgctacatggcgaatcgtcggaccgtcttctattacttgagcaggcgctcctgcaatcgggaggtcgagtccttttttatcttaatcataagatttgcacaagtttatcaattaaatcatatgctacagattacctggtggtaatatagccactctattaaaaaccccttaagtcacgaatcgtgcccaggctataattctccgataattgctacgattttctgttaatccccgggcggaattttaactcttccttcta

SEQ ID NO: 4187 - DNA, 680 bp, Photorhabdus luminescens
  misc_feature (506)..(506): n is a, c, g, or t
tccctgtatcttctaccttctgaccaatacgtagtaccccggtcggagggtttgaagatcgcaatccaccttaacgtcttgagtgaaaaacaatcatgttgacgttttatattcagaagaaggagaacaatcgattcgatattgatggcgacgtcagtgaaaactggcgttggaggtagtctgacaacggtcaggacggtgtaaaccgcgaacagctcagagagctggggtgcctcgtaagaactcaacctttcgccaccccgatgcacagatatcagtcgagccgcaggaagcgcaaatcaaaccgtgccgttggggttgagagatgacattcagaataccgttttgtattgcctgcctccgtcaggttacaagcggtggtgtcgtgtgggttaaaaaggacatcgtctgcatgtcaaagctgattaaacagttagtcacattggcccgtcaggttggcgggagttttaacaccgtttcagacagaatgaaaatagccaaacgtntcggcggacagcatggcgatattaaaatttcaaatccgtgatattaataatctgaaaattaatcttatttgaacatatatctatagccgaaagtccaaaattttttcaaagcccacttacaaaatgagatggccggccgttcggcgatattcgctatggcgggaagactcaatt

SEQ ID NO: 4188 - DNA, 749 bp, Photorhabdus luminescens
  misc_feature (738)..(738): n is a, c, g, or t
tacgccatgttttcgcacaagcagatcaaaaagcagatttagtcatcagcagtggtggcgtttctgtaggtgaagcagactacactaagcagatactggatgaattaggcgaaatcagtttctggaaactggcaatgaaaccgggtaaacctttcgcttttggcaaactaaaaaacgcctggttctgcggtttgcccggtaatccagtttcagccgttctcactttctatcaattagttcaacctttaatcgcgcgtctatccggttttacggcatggcaaccccctatgcgtatgcgcgccaaggtcaccacgccattgaaaaagagaccgggaagaatggattttcaacggggcattacttcggtgaatgaacaaggtgaactagaagttcgtacaacaggacatcaaggctctcatatatttagttcattcagtcaggggaactgcttcattgttctggaacgtgaacgtggacaggtagaagttggtgaaaatgttgaaatcgattgttcaatcacttactgaaaaatgaataatgaccattgaactaacagatgcagaaaccctacgctataaccgccagattgttctacgcgggttcgattttgacgggcaggaaaaattgaaatcttcggcgatcctgatagttggtgccggtgggttaaggtgcgcagcatcccagtatttgaccgcagcaggtgtgggaacaataacactgctggattttgataccgtntgcttgtacaa

SEQ ID NO: 4189 - DNA, 669 bp, Photorhabdus luminescens
  misc_feature (472)..(472): n is a, c, g, or t
ctttgaaggttactggcatgacgggagcgtcttcccaatccgcttcggcaatatgaatataggctatgccgatatcatttagcacactcgcggcagccagataagtggcttcgggcgtatcatcttttgaacccatcagggttgtgagtggtgccaggcgaacacctagcttatctttccctatcgcgctagccactgatgtagcgacttctctcaagaaacgtaaacgattttgtaaagttccaccatattcgtcatctcgtaggttagtctgagaatcaataaactgattaataagataaccattcgccgcatgaagctctacaccatcaaaacctgctgcaatagcattatttgctgcttgaacataatcatttacgatatctggaatttcatcaagtgtcagtgctcgtggctgcgagtgttgtaccatttcaccgataccatgttcaggtccacgggctgccacatncaaaaaaactttacaccttttgcttgaagggcagagggagacaccggctcagaattattgggttgtagaatcgtgtgtgaaacacgtccctacatgccataattgagcaaaaattttgcctactgccatatgtaccgcatctgttacttttcccatcctattatctgctcaagcttataatacctgggcgacatgct

SEQ ID NO: 4190 - DNA, 755 bp, Photorhabdus luminescens
  misc_feature (563)..(563): n is a, c, g, or t
caagcttcccagaattagcatcccttgctgaacaagagatcatttctcaacctgagaaatatattaaacaagcgtcagcagagctggatctaagtgctctgacgctgatgctaaattttccgcaagctgccatgcaatcgcaaatcaggggcgatatctctcctgagcagtgggatgatggtttgccgatgtttttcaccaattatcatttaacaggaatgcaatcttggaataaaaatcaaagtgaacagaatcaatatctgaatttacgtagtggctttaatttaggtccgtggcgaattcgtcataatagttactacaaccatacgggtacaacatctgaatggcaatcgcttaaagcctatgctgaacgggatattcgcccattaagatctcgtctggtattgggtgaaacatccaccgatagcatggtattcgatagtttcacttttaatggcattaaattgatgtcggatagccaaatgttgccagatagccagcaagggtttgcgcctgttgtcccgggtattgctatgactcacgcaagagtagaagtgcaccanaaagataatattatttatcagacttttgttccaccaggcgcgtttgaaattactgatatttaccccaataacccgaatggtgatctggaaatatctatttatgaagaaatgggcatatcagaaaatttactcagccctttgctgcctcacattaatgatccgtgccggccaatgaaatattttgctatatca

SEQ ID NO: 4191 - DNA, 672 bp, Photorhabdus luminescens
  misc_feature (413)..(413): n is a, c, g, or t
  misc_feature (562)..(562): n is a, c, g, or t
  misc_feature (594)..(594): n is a, c, g, or t
  misc_feature (619)..(619): n is a, c, g, or t
ccagcaaccattgtgctgtttgtgtcgtttgggatgggttgctgatccgtgcttgcggtgatttacccaataaatgtacctgcccatctgggctatatatcagccaaaaatctgttttgcctgttgtcttgggctgccaatattccaatcggctgaaatgactttccagacgggaacggtatccggtaacggtgaaggtagcgcctaggttgataccctgtaatgtcgattcatcacgcggttgatccgcgactaccagtacttcgccttccggcccaaggaaagtatcggtttcgttataatgggggacaccaaaatgggtgcggcggcggatggtcataacgttgcaatcccaacccagaccaaatggagtgttaccggcaccgctgttgtagtttaaggcgagtgacggngcataaccgcgcccggcagaaataggtaatggtagagatagcgcggccataccatccggtccggcgggggttaacgcttccccattcccgtgatagcgcctcctcctttgggcaatgatagttctgtaatactaaaatcttgtgattcntgcatgaaagactccttgcaggccccatttangggcctgttctagcacttatttganatcgttattggcgaatggtgtagcgaatatgcagattgatgtcgcttagactt

SEQ ID NO: 4192 - DNA, 730 bp, Photorhabdus luminescens
ccggcttgtcgtaccccatacccaatgcagtagttgccaccagcaccttaagttgattggttagcaataactcttcaagatattgtcggtaatcgttactgttttcaaaaccatcagcctcaatactgctatggtaggctctggcatttatgccattgacgttcaaccaatttgctacctgttcggcatcacgcactgttaaggtgtacacaatgccagtaccatgcaatgtgggaatcacttgcgccaaccaagctaggcgagaggattgatcaggcagcaccatagtttgtagcgagaggctttcacggatcagtggaccacgctggatctggatattacccagttgtgtttggatatcagccaccacgcggttattggcagtggccgttgtgcctaataccggtgtattaggtggcaactggcgcaaaatattgactatacgccgatagtctgggcggaagtcatggccccagtcggagatgcagtgggcttcgtcgatcaccatcagagcaatacggtcagcgataggatgaagcacggtttcaatgaagttatcattggcgagccgctcaggagaaatcagcaggcaatctatttgattatctataatcctttgtgtcaccgtctgccagtccgctgtattggtggaattcatagtctcggctatgatgcgcaggcggctggcggactcaatctggtacccatcagaccagcaaggagaacataa

SEQ ID NO: 4193 - DNA, 659 bp, Photorhabdus luminescens
tactctccgattgaaaacgttattaaagcacttcattttgaaaaatagattaacggattaatggactcatattatcatttatctttctccccgaaaacataaccaaaccaatttttatttctccgcttccattaatggctttataattggcagattttaaattattattaaaagtcattttttaaccgatgattttaattagcataaaactttaaccgttgtttttaccacttataacacttgctttttcactaagtttaatcattatgaaatatcatactttacgtttacctaacgtaggttaccccggctttttatctttattaacactattttatagataattttaagcagtttttatagaccaccaccatttgttttttacatgaattagccaataaataatctaatgatataaagatacccctttattttttcggataatcacctctttttcagggcttaaatccggccaaattaaccgttttatcccttttttattacattgctttttacagtttgcttcacaaaataacagtgagaaaatactttcatatcatcctgttaggataataacattttacgtactagtttgcttccaactctctattaatagacttatacccgtcatctttcaagctgcctctttgttggctgca

SEQ ID NO: 4194 - DNA, 722 bp, Photorhabdus luminescens
atgacatggctatgcagccgttgaagcgcctttctgtggtgccttacattgaacaatccacccgtctggaagcgctggagactatcacggttcaggatattgttacgtatcgtcatgagatgataaaaaatgctgctttgcaaatgatgatcattgggaatttgaccgaacagcagagcaaagtgattgctgaatctgcccataaccaactggcaaatcaaggaaatgattggtggagtggggataaggtggtgattgataaaaattacccggttaatttccagcgtgttggcagcagcacagatggtgctttagcagaggtttatattccgacgggttataaccgtatagaaggttatgtttattccagtttgttgagcaacatgctccagccgtggttctatgagcagttaagaacagtagagcaactggggtatgcagtgtttgctttcaataccagtgtgggggaacagtgggggttgggtttcctactgcaaagtaatagcaagcaaccaaaatatttgaatcagcgttatcaagatttctatcagaacgtgggtaataaattgaaagccatgcctcaagctgattttgagcagtacaagagtgcgctgattaatgaaaagcagcaaccgccacatactttctatgccgaagttgcccgtttctgcggtgacttcagtcgtaataactttagtttgacagtagagataaatgcttga

SEQ ID NO: 4195 - DNA, 643 bp, Photorhabdus luminescens
catcaacttttttgatgaaattatccgtcagcttttgaatatcatcctgcgcacgacgctcatcatcttcactgatctctttgtctttcagcagtgctttgattttgtcgttagcgtcacgacgaatattacgtacagagacacgcccctgctcagcttcgctacgaaccaccttaatcagatctttacgacgctcttctgtcaatggtggtaaaggaacacgaattgttgtccccgcagaagatggattcagccctaaatcagaagccatgattgccttttcaatcgccggcgtcatagtacgatcaaataccgtgatagccaaggtacgtgcatcctcagcgatgacgttagcaagctgacgcaaaggcgttggtgcaccataatactcaacaatgataccatccagcagactaggagaagctcggccagtacgaaccttgctgatttggtttttaagtgcttcgacgctcttttccatacggtcttgtgcgtcttttttgatttcattaatcacgttacatacccttgggaactggttgttcaaagccctaagctattatgaccatgtttgttaaatctggcgtatcaggccactcatcattccgccaaacatctgtggtgtctatgaacattactcgtg

SEQ ID NO: 4196 - DNA, 734 bp, Photorhabdus luminescens
agccgagcatgacaaaaatttctctctataccctatggatttcaagttgcatcgtgacggcaagggagcgaatccccgggagcatagataacgatatgaccggggtaaacgagcgcagccaacaaagaggcaacttgaaagataacgggtatatattcataaatattatcgagccagttattaacagatcttaatgagttcgaatatctgttttgagtctgtaagttaaatttagactgtaatttaaattgtgtaattgcctattttttctctttccatacttaatattagcatttgattcaaattagcttattattataagaaaagtgcatattctagtattgaagataaatcttataactcaatattaataataagaatattttatcaattagtcttgttgctttcttagagtgtattgtttttaatatcgatagcttgtaatttgacttcttataatgttgcctttttgttttggtctttctcatttctactgaaaatatcattgatttttaatatgttttattccatttgtaattttacttattatttttttatataaaaatataatttaaagtattttctgttataaacactgaaaatttattaactattatcatgttgaacattgtgtgagaccaaaaatgaaataatttcagcttacttgtaaatcctcgacattttgttaatacttagttagatttagctatctagaagtctaaacgtgtaaatgg

SEQ ID NO: 4197 - DNA, 653 bp, Photorhabdus luminescens
  misc_feature (653)..(653): n is a, c, g, or t
caaggtgatggcgttattaaggtagaaatgcacttcttgcctgatatttatgtcccttgtgatcagtgcaaaggtaagcgttataaccgtgaaacactggaagtcaaatataagggcaaaaatatcaatgaagtattggatatgacgatcgaagaagcccgtgaattctttgatgcggttcctgctctagcccgtaaactgcaaaccctcatggacgttggactttcttacatccgtctgggccaatcagcaaccacgttatcaggcggtgaagcgcagcgagtaaaactggcgcgtgaactatccaaacgcggaactgggcagacgttatatattcttgatgagccaacaacaggtttgcattttgctgatattcaacagctattaacagttctgcatcagttacgcgatcaagggaataccattgtggttattgaacataaccttgatgtgattaaaaccgctgactggatcgtggatcttggcccaaaaggaggtagcggcggcggtgaggttctgatttctggtactccagaagaggtcgcggaatgtgaaaaatcacataccgcacgtttcttgaaacctatattgaagaaagaagcataatttatagataggggctcagttagccccttattttctagccgcaactn

SEQ ID NO: 4198 - DNA, 741 bp, Photorhabdus luminescens
  misc_feature (604)..(604): n is a, c, g, or t
  misc_feature (609)..(609): n is a, c, g, or t
acatccaacaattcagtatcggtgcacccattgctcccggagtaccttgggtacacgatcgacaacacaattattggctggcattgaaatcaggtaacttcggcaatatcgatttcttcctgcatgtacaggagatgtttcatgagtgaacaagcactaaggtcagagttagtcgaatgggctcgttcaatgttctaccggggttatagcagtggcggtgcaggtaacatcagcgccaaactggaagatggcacgattatcatcacgccgaccaactccagttttggtgacttgcaagcgaatcgcctgagtaagctagatgcagagggtaattggctatccggtgacaaacccacaaaagaagtttccatgcatttggccatgtaccgcaaccgtcccgaatgccatgcggtggtccatctacattccccttggttaactgccctttcctgcctatccaatctggatagaagtaactgtctacctccgattacgccctactatgtcatgcgggtcggaaaactgcctctggtcaaatatctgccaacaggagatgaaagaatcggtgaagaaattgcgaagctggcccgaaaacacaacgcantcctnctctcgaaccacggacctgttgtcggcggccaaactttaccgcaagcttttttcaacgcagaagaaattgaagataccgcacgggtctatttaccctattgcccacggcttcacgacttaaatgagagcagt

SEQ ID NO: 4199 - DNA, 672 bp, Photorhabdus luminescens
tactgatgaaaatacaggcgaaaaaacagtaggttaaccgtttttagtattgcggccataatcttagtttatgcgaaaaatcgtttcagctaattctgaaaaataatgaggaaatatcaatggaactggatgatctgttatctgtaatgacaccagaaatatatcaacgcttggttcaggcagtagaactgggtaaatggcaggatggtgtgcctctaacggtcgagcagaaagagaatagtttacaaatgattatgctatggcaatcaaggcataaccatgatccgcaacatatgacgattggtactgatggtcagttggtgatgaagagtaaacaagaactgaaagcgatctttcggtctaaaatggtggcaacattcaagccataatctttggcaaattaggtatgaaaaggctgagtgtgtaaaactcagcctcgccttggattgatatcagagaagagcatcttctagttgagcaagttctatcaatatagcgccttgctcttttagctcttttaaggctgattggctatcatttggactcaggttaacccctcgacagccatccgtaatgacccaggtttcataacctaatgccagcgcatccagcgcggtaaatttcacacaatagtcagtggcgataccaataataaacagacgttcaatttgc

SEQ ID NO: 4200 - DNA, 759 bp, Photorhabdus luminescens
  misc_feature (634)..(634): n is a, c, g, or t
  misc_feature (722)..(722): n is a, c, g, or t
ctgtaaaaaagcaattaattcctgattaactttatagggttgctccaatgtagaaatatgccctgcatcctggataataatatgatcacagtgcaatatttcagccatcaaataaccctccagaggcgggcgaggcgtatcttgttcaccagtaataacaagtgacggaatatctaatttttccaacaaatgagttctatcttcacgcccaaatattattctacctaacggaacaatactattgcgcaatatttccgcaggaatggcgaccagacgctgagttaattcatcaaccaaatgctgagccggttgctggctaaagaaggctggcactatctgctgttgcaaaatagattgaggaattgcaccaacctgctctatcgcatccaacatggcaacgtattttgtataagtcacttcaggttctaatccgacaaaggtatccatcaaaaccagtgctttaactctgtccggtgccatatcgaccaactcaattccccacataccaccagcagataagccaatgatagcgaattcttcaatgccaagttgatccatcaacgccaggtaatcccgagctaaatcagccaaagtgctatgttgttccggtaactcttccgagtttccatgcccncagagatcaggagcaatcacccggtattgtttacttaacgcctcgatctgaggtgcccacatagtagaatcaaacaaatagctatgtnccataataacgggaaaccttcaccttcatctcggtaa

SEQ ID NO: 4201 - DNA, 730 bp, Photorhabdus luminescens
  misc_feature (587)..(587): n is a, c, g, or t
  misc_feature (730)..(730): n is a, c, g, or t
atgtctatactcgcaaacttcatcaaagaaataggcaatttgcttcatcgcttcgttggaatcagctgctctatggattacatctgcacctgtccagacactatatttttgtcttattgaacgtgtagtgtcttcttctgggtttgagtaagctccggcgaagttaaatatacttcctaaagcattatgtccactcagaaccagcaaagttgatggagctgactgcattaccgttttgaactgcttatgaaagggtttacccaaaattttgggatataagaagtagaagtcttcgtcatttagcaccaaagaacggatattatgtattttgaatcctttttcttcgaactcagtgataattttccctacaagccctcgatgaacagcatccggcttgattaaaataaggcttttttctagcatgaaaccttctccagaatttcaattatatagtcgattccttcctgagaaagatctggatgggtaggaatggttatcagatttttgaggacagtatctcctttctcaatactgccatcataaaatttattgaggataccaaacttatacttagcctccccatattntagaaagtccgtttcaaatcccatatcttttagtacctcatgaacattgccaaggtctctatgatctttatctttaagtactaggttgtagtagttaggttgtcctaggcaatcaatttcttcaatctcgtgctcactatgcn

SEQ ID NO: 4202 - DNA, 772 bp, Photorhabdus luminescens
  misc_feature (266)..(266): n is a, c, g, or t
  misc_feature (319)..(319): n is a, c, g, or t
ttattgacaaattgcactaaggagagaatagagcgcgttaatcagacatgtaattgaaatatcaattaataatattctgtgcataagatattgcataattatactaacgggtttagcatcggactaaatcactgactattcagaattaaagcatgagtattcaattaaaaagcatcgattgctattacggtgtccatcaggcactgtttgatattaatcttgaatgttcttcaggggaaacgatggttttgctcgggccaagtggngcaggtaaaagtacattgttacgagtactaaacctgctagaaatacctcgctncggccagttgcatattgctaatcatcaattcgatttcgaacaaacaccgggaacaaaggagattcgttctctacgcctgaacgtatgtatgggttttcagtaatatcacttgtgggcacaccttactgttatggataacctggtcgaagccccttacccacaactgagtgtactgcaagctccaaacgcaaaagaacaacgccataagctcgcttcacctttgtctctcacaccgaaatttgtgcttctcagtacttcactctttatctgtaagctatctctagcgaacatcttactagcttgccttcatctgaagggattcacttgttcattctttctcatctcaacaccctcgaattttcctaccacgctatgtccgtcctccgtactgctgtttttgctcaacgattcgcaaaatgtatcgcatgatataaactgtccttatcgcttaag

SEQ ID NO: 4203 - DNA, 662 bp, Photorhabdus luminescens
  misc_feature (64)..(64): n is a, c, g, or t
  misc_feature (94)..(94): n is a, c, g, or t
  misc_feature (127)..(127): n is a, c, g, or t
  misc_feature (132)..(132): n is a, c, g, or t
gcatgtcactgaatgcgggcagatcgaagaagaagtgctctgtttcacgcatttctggcgtcgngccggagacagcagaacgtgggttgattanttcagttgggctgtaggttgaaccgcaaacttnacagntatcgccatactgatcttctgccttacattgtgggcagctccctttaacatagcgatccggcagaaacatcagtctgtcatcgatcatatatctgagatatagcactactcttaatctgaccgtttttctccagttctagataccatggggttgataccccttggcgcttctttctatgccttagagattcgcgaatatgcacttgccccaacttaccatctacctcccccagctttgttaactgcgtcgctttcttttcgccctttgcctcttttctttttcttttctcatcacacccaattaacatcaatttccgttttccgttcatccttgtccgccctccgtcgtcttcgtttcctagcgctcttttttcctctcgcactcgtgcttcatctgcaatccgttccgatttacccgtctccctctccctacatcgacagctgtctctttatccccattacctcctcactttccgtttttttccacagctcgcatcaattgcttgttagtctcgctagtcacgcttctt

SEQ ID NO: 4204 - DNA, 752 bp, Photorhabdus luminescens
  misc_feature (657)..(657): n is a, c, g, or t
  misc_feature (752)..(752): n is a, c, g, or t
aagcttaccagtcgcagccagacaaccatcccaacatctgtccgtaaagcgcttaagttaaaaccaggtcatgacagtatcgcatataagattttatcttctggtgatgtacttatcagccgtaaaaatagtgaagaagaaaaagatcttgtcatggaatcatttctggactttctggcaaaagacattcggagacatccgggacaagtacaacaattagatgaacaactcattaaccaggcgaagtcacttatcgctggaatagacatagatctgagcaacccattatctgctgacgatgagtaaagactatgtatgatcgagtatgtgtaataaacggatgggctctttttgctcatccgtgctttgtagaacaattaaaacaatcaatagataaggtagaacaacttcaacaaaaatatccaaatgactacttgaaaaaaaatgatacaaaacgcttggctgcaatcataaaactcgttactgaaattattcccaatgacccaactaatatagcctttcgtttaggtgacacattaggtggcaaaagaaaacacctgttcagagcaaaatttttccaacaatatcgcctttttttccgttttcacgctgaaagtaaaattattatctttggctgggtaaatgatgagagaacanaaagggcatatggtgataagcacgatgctcacaaagtattttggtgaaatgcttaatgcaagacacccaccagacgactggaactctctttaaan

SEQ ID NO: 4205 - DNA, 664 bp, Photorhabdus luminescens
tggcaggtcacgctaaacatattgaagtgatccttcatagcgatcagtcactggaggtcattgatgatggccgcggcatgccggttgatattcatccagaagaaggcgtttcagcggttgagttgatcctgagccgcttacatgccggtggtaaattttcgaataaaaactatcagttttctggtggtctccacggtgtggggatctcggtggttaacgctttgtccaagcggattgaggtcaccgttcgccgtgacagtcagatttatcagattgcttttgagaatggcgataaagtgcaggagctgacagtaataggaagttgtggtaaacgcaacactggtaccggtgttcacttctggcctgacgaaaggttctttgatagccctcgtttctctgttttcccgttgacccatttgctgaaagcgaaagccgttttatgtccgggagtggaaattgtttttaaagacaagatcaacggtactgaacagatatggtgttatgccgatggtctgaccgactatttgatggctgcgggtaatggcctgacacattgccggctgcgcctttgtcggtactttcagtggtgcaaccgaagcggttgactgggcgttactctggtttgccggaagggcggaaagctactggctgaagttatgtcaac

SEQ ID NO: 4206 - DNA, 751 bp, Photorhabdus luminescens
  misc_feature (475)..(475): n is a, c, g, or t
  misc_feature (587)..(587): n is a, c, g, or t
caatcagggcagcagtaacatcatgatcggtatcctgaccgctattcctcagttttgtaccatcatcggcatgatttactggagtcgccgttcagaccggttacaagaacgtaaaatgcatacagctctaccctatctgttcgccgccgtgggctggatattgacctcattgaccaaccacagtgtcattcagctcattgggattattatggcttcaaccggttcatttaccgcaatggcggtcttctggacaacgccggatcaagctatcagtttacgtgcaagagcgatcggcattgcggttattagcgctacaggcaacataggttcagcactcagcccgttattaatcggctggctgaaagatcagacaggaagctttaataccgggctctatttcgttgccggattgctggtcgttggcgcagccattatctggttgatcccaatgaaacacgccagacagagaacagcngccgtattttcaataaaaaggaaaaaccatcatgactgagcctatcattgccaatattgatatcagcaaggattatgatgaaacccaaggcactgatgatgtgcactatcanacctttggtcggatggcagcattttttggtcgtaatatgcaagctcatcgtcaccatgggttcttccaacttcattttttgatcaccggccatattgaattacagttagatgctcaacactattctgtacaggcaccgctgttatcctgacaccgcctccgttc

SEQ ID NO: 4207 - DNA, 675 bp, Photorhabdus luminescens
  misc_feature (372)..(372): n is a, c, g, or t
  misc_feature (626)..(626): n is a, c, g, or t
tttccctctaaggattggtacacctgcgccagagaaaccgtgcgttccacttccagcgcacgttgttcttgtttcaggtgcgcatcttccatttgggccagattcaacattaaggtttctccggcaagcagaccggcataggttccttgccaggctcccggtttaataaagcgtgcagaggtatcattggtttcccaacggtaagcttgttctgccatcagacaacgggcgacgactaaatcgtaaaattggaagtaaatggcagctaaccgaccacgtaaccagttgtacagcgcttgattgctgaattttcgttgcaggaaagccagttgagcttgagtttgttcctgttgggttttcaggctggttttntgtaataccgccgcttcacggcgcactgttagtgattgaagttgagcatcgatctgtttcatctctgcttcggcattattacgctggatttcccactcctgacgacgacggcgccatatttcagattgcgagactttctccgcttcaattaacaaaccttctgcggcgatcccgccaccaatagcaatggcattggcaattgccccatagcgtgttcccccgaccgccaagccgtagatattgggtaccatctncagcgcggcggcagccatgtgcatgcctttcaatccgctggtaatactt

SEQ ID NO: 4208 - DNA, 361 bp, Photorhabdus luminescens
  misc_feature (183)..(183): n is a, c, g, or t
  misc_feature (189)..(189): n is a, c, g, or t
  misc_feature (191)..(191): n is a, c, g, or t
  misc_feature (194)..(194): n is a, c, g, or t
  misc_feature (196)..(196): n is a, c, g, or t
  misc_feature (203)..(203): n is a, c, g, or t
aagcttcattgataatttgtgccgcatttttcatatatcaccttccaatagtttctgtgttgtctcttgtccagcctggaaatgctttcttttttctttaacctgatgaatcgtggcgattcgtgctaatcgctccagtgttggatgctcaaagacactgctcaacagtatttcaatgtttanatcatngngtntnaagctgntaaggcgggttgcctgaagagagtgaccacccagcacaaaaaagttgtcataaatgccgacttgactaacgcccaacacttcttgccctaactgactgatttttctatctactccattcctcggcgcgacctaaccttgctggcggaactcatcttca

SEQ ID NO: 4209 - DNA, 688 bp, Photorhabdus luminescens
  misc_feature (275)..(275): n is a, c, g, or t
  misc_feature (688)..(688): n is a, c, g, or t
tacagagttgccgttaatgttttgttacaacctaatcccaaattaaagatgttgccatagacatagtgagtattagaaaccatctttaatctttgttttagatggggtgtttctccaccaactttttctacttctcattccatcttctcctctcgccttcacgatgcatcccgcctactagggatcgcatccttcgttgtctagctttcgatcttcctgtggccatactcgaaccatcccatcctacgtttccacgctatcctctgtttttattnatccaccctcttctttacccacattctccctacatcttttttgtttttcaccgtcttctcatccctccacattccccttactttctgtttacccatcggcatcctatattatttgcaatcgttttcttctccgactcatagttccttattctctgtctatactcatttcacccacttctctcttcttttcagcttatctgttttcatcctttatcctcccctttccttatttttttccgtcctctctttttccgtctccctcgttttcatgttgggtcatcacttgctgtttaccattcgtctctcatccttctcatttcattcgtctattcgccctttctcacttcgcttcccgttttttaccgtctcgtcggtaatctcccatcagacctccctcatcacgcgccatattn

SEQ ID NO: 4210 - DNA, 764 bp, Photorhabdus luminescens
  misc_feature (568)..(568): n is a, c, g, or t
aagcttagtcgcggctgccggagaatttgctgcggctggcaatgtcggtgaactaaacaaaaccacgctaacaaaagccgccggcaccgacgcaattaataattttagtctcaccttggacggtataaaaaaggtatttaaggcaggcgcggctagtgctaccgtcagcccagaaaaattggaagagctgcaaaaagcaactgatgatttaaaagaggtcgcaacagatacgctaattaccggggcatcgctaggtgcgacagtcggagccacactggataccgccgccgcggtcgtgccacacccggtagccaaagtggcactcaaaggtctgtcattggcatggaaagttaccggcattgttcacaccgcagaagaattaagcgagctcgcagaaaaacataaggatctggtttctaatgagctaggacaagaattaaaaagggaggtcaccgaggcaaaccaaattaggcggggaaccattctcgcaaaagttagagaacacggtttgataaaatagtctattaaatgcaatagtccttattcgccgaagcagataaggactatnttgttttgaatcatatgtatcaatcacgaccagaattaacacaagattcttaacatactgatcatactaatgaagtctactctcaccctgctccggcaaattatcttcatcttgctcatcaggatcttcgaagtaagtgccccaaccgtcataattaatgccaattttttcagctagattcaccaactgttcacct

SEQ ID NO: 4211 - DNA, 675 bp, Photorhabdus luminescens
taggctttgagttagtcggcttggagtttattcgtgcacgtgtttctacactgcggatttatattgatagtgagaatggtatcactgttgatgattgtgctgatgttagccaccaggtcagtgcggtattggatgtcgaagatcctatctcagtgctttataacctggaaatttcttcacctggcttagaacgcccattgttcacgactgaacattaccagcgttttattggtgaggaagtcagtctggttttacgtatagcaatgcaaaaccgtcggaaatggctgggcattattaaaactgtcgacggcgaaatgatcacggttacggtggatggaaaagatgaagtgttcgcactgagcaccatccagaaagcgaacctggtaccccacttttaaagttcggatgaggcaactaggatgaataaagaaattctggctgttgtggaagcggtttccaacgaaaaatccctctcacgcgaaaagatcttcgaggcgctgggaaacagcattggccacagccaccaagaaaaatatgaacagatatcgatgttcgtgtcagcattgaccgtatatttggtgattttgacactttccgtcgtcggttagctgtcgaagaagtgactcacgcgactcgtgaattaccctagaagccgctagatttgaagagcctgat

SEQ ID NO: 4212 - DNA, 748 bp, Photorhabdus luminescens
aagcttcatggtccgatgttcagcttgaagatcctttgggtatggaagtaggttatcgtctgattccgatggttgattttcgccagaatggtgaattactggggaggatcagcggcattcgtaagaaatttgctcaggagatgggatatttaccgccggttgttcatatccgggataaccttgaactggccccagcgggctaccgtattctgatgaaaggggtagaaattggtcgtggtgaagcgcatccggggcgctggctggcgattaaccccggtggtgccgtgggggaattgccgggtgatatcaccaaagatcctgcttttggcctgtctgcggtttggattgatgatagcctcagagagcaagctcaggttcaagggtacacggtggttgccgccagtacggtggttgcgacccatatgaatcacctgttgacgcaatatgcgaatgagttatttggtcgtcaggaagctcaacaactgtttgagcgggtcagtcaagagatgcctaaactgaccgaggactttattcctgatgttgttaatctgacaaccttgcataaagtgcctgcaaatctgttgtccgaacaagtgcccgattcagacatgcggacaattattgaaaccttggctgaacatgcacctggacaactgatccttatgaattgacatctttggttagaattgcgcttggcccggcaattgctcaacagtggttccccggcgcacaggaaattcacgtcatc

SEQ ID NO: 4213 - DNA, 664 bp, Photorhabdus luminescens
  misc_feature (354)..(354): n is a, c, g, or t
ttatatgcagccctgtgatttcagttgattgtgaaaaacaaaaaggccacgccggagcgcaaccttgatgttttaatataatatgataattgaaggatatgttaatctaccaatttcaattattcatcaaagaaattcaattcaatttctagtgtcttaccgactgattcaacaaataacgcttctaattctgatgagtcatcagttttagtatacaaaagagtcaataaatattttgtttcagctacccctaaatcatattctttacctaagcattttacaattaatctttttgaaccaaattgttccttgattttactggaattatcttctacatgaataacaaaacaattntggaggagtgctagctgtatgagctacattcaattctataatattttttaggagcattgtattattactgatttcttcccatttcccatgctatatccaatgaataattaagtttattatccgaaccaaaatattccgttctcatactagaggctctaccaacagtgaaccttgctttcaattgatacccaggttcaatatgccggcttacgttatacctgtttttactcccacaaatccccaatcactagcgctcattatctgcttgcgttggctgccacggtacaaattcgcctgctaattaccataa

SEQ ID NO: 4214 - DNA, 720 bp, Photorhabdus luminescens
  misc_feature (682)..(682): n is a, c, g, or t
catctgattggtggttttgactttatcccggaccagtgattcccggacacgatgcaacgctcgcatggcttgttgggcttccgttctgggctgaacaaaacgcattgaaggtcgtgaggcggcttcacagatggcttccgcgtcaataaaatcattcttgttacttttgacaaaaggacggacaaactgcggtgaaatcagcttagcctcatgccccaaatcagcgatccgccttgccatgaaatgcgcgccagcacaggcttccatcacaaccgttgccggagagcaatcggctaagaattccatcaatttagttcgggtgaattttttacgtagcagagcttttcccgatggctcctgacaatggacatgaaaagaatgtttgccgagatcgatgccaatcagtgcgatagtgttcatgatggtagcctcttatcaaagataatcactctgctaatatactgccgttagagtgaggggaaccatctcattaccttggggcatttatgtggtaaagcagctaaagaagccctttaacgtataagtattcatgggccgataatgggtaatagtccggttgaatcgcccactttaccgctaaataactcaagtgccccagactcttttatgctctcatttttaccctctcctgtggaagaccccccaaatttgacgatcaatntaatccaggatctaaatatctattactttagctaagac

SEQ ID NO: 4215 - DNA, 645 bp, Photorhabdus luminescens
  misc_feature (478)..(478): n is a, c, g, or t
  misc_feature (500)..(500): n is a, c, g, or t
tccctgtatcttctaccttctgaccaatacgtagtaccccggtcggagggtttgaagatcgcaatccaccttaacgtcttgagtgaaaaacaatcatgttgacgttttatattcagaagaaggagaacaatcgattcgatattgatggcgacgtcagtgaaaactggcgttggaggtagtctgacaacggtcaggacggtgtaaaccgcgaacagctcagagagctggggtgcctcgtaagaactcaacctttcgccaccccgatgcacagatatcagtcgagccgcaggaagcgcaaatcaaaccgtgccgttggggttgagagatgacattcagaataccgttttgtattgcctgcctccgtcaggttacaagcggtggtgtcgtgtgggttaaaaaggaaatcgtttgcatgtcaaagttgagtaaacagttagtcacattggcccgtcaggctggcggcagttttaaaaccgtntcagacagaatgaaaatagccnaacgtctggcggaaagcatggcgatattaaatattcaaatccgtgatattaagaatatgaacattaatcatattgaaaaatatatcgatagccgaaagtcagagaatatttcaaagcgcacgttacacaatgagatggcggccgt

SEQ ID NO: 4216 - DNA, 751 bp, Photorhabdus luminescens
ttcacgacttaccacatgcacccgaatatcttcatgttcaccagataatccatgaataccggtcgctgtcgtggcatccacttcccccaccatcacagagatacgttccgttgttcctccgggactggagagataactcaacacgggtctgcaacgtttaacttcgattccggcctcttccattgtttcgcggcgcaccacctgttcgacatcttcgccctcttcaatcataccggcaacaatttccagtaaccatggcgtcgctttcgtctctattgccggaatacgtatctgctctatcaatacaacctcatcacgacgtggatcataaggtaacaatgcaccggcatggccccgctcaaaaacttcacggctaacctcttcactccaaccaccggcaaacagacgatgacggaaacggtaatttgtcagtttaaagaatccattgtacaaactttttttcgcgataatttctatatcctgcttatccaacatgactggcgttaacggcttcttatgcataaaattctcctaaatagttccttacttgctagccactaagatgatattaatcaagcagagttaaaaaattcactcgttgatggtggtaagttaagctaaattaaggcaatatggcacaaacggctaccttttcgctgatagcatactctgctagaatcagtaacatttccgttttcaccaaggcatcgtaagagtctatcccaataagcgtaattggtgcatgccgttt

SEQ ID NO: 4217 - DNA, 672 bp, Photorhabdus luminescens
  misc_feature (606)..(606): n is a, c, g, or t
tggcaacgccagtggcaacagtaccaacaccgggttctgaaaccagttttactgagatcagcgcattggggttgatctgttttagatcgaaaatcaactgagccaaatcttcaatagagtaaatatcgtgatgtggtggtggagaaataagtgttacgccgggtacggaataacgcagttttgcaatatacggtgttactttatcacccggtaattgcccaccttctccgggtttagcgccttgcgcgactttaatttgaatcacatcagcgttgaccagataagcaggtgtcacaccaaaccgaccggaagcaacttgtttgatacgggaaaccttttttgttccataacgtgcgggatcttctccaccttcgccggagttggaaaaaccacctaacgtattcatggcttcagccagagcttcgtgtgcttccgggcttaatgctccaatcgacatcgcagcagtatcaaagcgtttaaatagctcttcggcaggttccacttcttcaataggtagaggctcagcttctgtttttatcgccagcaaatcacggattgtggtaattggacgctgattaaccaaacgagaatatttcaagtaatcgntatattcgccactatgaaccgcagcctgtaaagtgctgacaacatccgggttataagcgtgatata

SEQ ID NO: 4218 - DNA, 752 bp, Photorhabdus luminescens
  misc_feature (630)..(630): n is a, c, g, or t
  misc_feature (752)..(752): n is a, c, g, or t
aagctttgacagaagagcaggaaccgacaaaacaggagctgtttcaggctttgccggtatctcaacaaacacaagttgctgacaactattcccgggagaaaagagaatacgaagcggttgtaacaaatctgaaagcagagatgaacgtcaatctctcttctcaacaatcacgaaaaagcgatatcaatgcgctcactaagctccgacaaaatatcagccagcgtttaaaagcacgtcaaaccttaagtcaaaaacaagtgatcagtaaagttgaatatcttgaacaggaaaaagagtttctggaaacagaacgcctgattgcccaacaaaatgcggagtttcatgttctgcaatcgcaatatattagcctggaagagcgcttaaacagcctgaaaacacaaaaagagcgcgaatggtttgataaaagaaaacaggccgaagttcaattggtcgttttagagcaagagctggcaaaagctcaggtacgggaacaacttgaagtcattcgctcccccgtcacaggaacagttcaacaactcagcgtccatacattaggcgcggtactgcaaccagcaccaaacttgatggtgatcgtccctgatgacaatgtgcagttgggcggaagtgcanattttaaacaaagaccccgggtttgtttattcggggcaccagtcaccattaaaggccatgctttcccttatacacgtattggccgaatgacggcgaactgttgagtattcccagagattcan

SEQ ID NO: 4219 - DNA, 661 bp, Photorhabdus luminescens
  misc_feature (505)..(505): n is a, c, g, or t
ccagaataggttgaacttcatgggtatccagccgagaatttccctgttccagagcctgttgtatgcactgatgggcacgtgctgtgttagctgtgatgtttgctggtagtgcgggggtttctgttaattgtttctgattgcggcgatattcaaccatgtgcatgaaagcagtaatcgcgccttcaggggtgcgataagttggaatacctgcttcactgaacagacggcgggcttcttgtgaagagtattctccgcaccaattggtaaagatagttagccattttccccgtgggtgtttacggattgtttcaatgactttggttgcagtttgaatacagggagcaattgcgctaggagagtgaataagtaacagagcatcatggtcgtggctatctagtaacggttttaacgcagcgatataacgttccaccgtggagtcatcttttaaatctagcgggttatgcagagagatagtttctgggaattgtatttttaatgctttccntggctcttcacctaattttgcaagcttgcctgtacgcgcgaataacgcatcccgcgccattgcgggtggaaaagcaccattgctaacgataaatagcctgttttcccgtaaaggcgacatatggcttacgtttgtacccgacgaaacatttcttgg

SEQ ID NO: 4220 - DNA, 783 bp, Photorhabdus luminescens
  misc_feature (6)..(6): n is a, c, g, or t
  misc_feature (16)..(16): n is a, c, g, or t
  misc_feature (729)..(729): n is a, c, g, or t
ccctgncgggaactgncctggggatcctctggagtaaccctgctcgcatgcaagcttgtaaggagtctaaatggctaacacttttgccctgatcctaacgttggcaacgttagtcaccggcattatttggtgtattgatcgtttcaaatgggcaccagagcgcaagaaaaaacttgccagattgcaggagctgactgagggtacaatggatcaggagcatctggctgagactattaacaagccaacatgggtggatacctgttcatctatttttcctgtgttagccgtggttctgatcctgcgctcttttgtttatgagccttttcagatcccatcgggttctatgatgccaactttattgattggtgatttcattctggtagagaaatattcatacggattgaaagatcccatcactcaaacaacattgattaagactggcgaaccaaagcgtggtgatgttgctgtatttaaatacccgttggatccaagttttgactacatcaaacgtgtggttggtttaccgggtgataaaattatttatgatccggcaaagaaagaattgcgtattttttctaattgcagtgagacagggaattgtcagggagaattaccggtttcttacggttcactatttccaagtgagtggacaatgcagcaatatggtgttgactccaaagtgaaagtttgagaaagtaggtgttttccaatccccgttgagaacattgncgcttacgtatgcggcagggtgaacaattgaaatttggacgcatgaacctcatt

SEQ ID NO: 4221 - DNA, 656 bp, Photorhabdus luminescens
  misc_feature (656)..(656): n is a, c, g, or t
accctactggcagattacccgatttacggggtgaatttatccggggctgggatgatgggcgtggggtggatattggccgatatctattatccgggcaactagcagatattgctccacatagtcacagggttgtccggatgtggtccaactcaaatggcggaaccgacggggtaggttcagcgggccgtattctcaatagtgtctaccaaaacattaactacggcattgatcctcgcggaataggcatcgctatcggcatgggatctggtggttacggctatatggataatgcgattgctgcttcaacgggaacagaaacacgtccacgaaatgtggcatttaattacattgtgaggattgcatgatgaataaggctgtactggataaaaataatattgccatcagtgccggaagtatcgttgtgtttaattacgatgcgattacgctggaatatttaaacagttctgatgagtaccttcccgttggtatcggccttcctgccaattcctgcatagacgcaccacctaaagcccaagagggatatatcgcctgtcgttcacctgatttaaccggctggcaaattgtaccagactatcgagggagattgctaacaacacccaactggggaaccaaaggacatcattaaccgggtgaan

SEQ ID NO: 4222 - DNA, 739 bp, Photorhabdus luminescens
gcgtaccgagaggtgcgctcttatcaatggataccgttatttgatctcgtttttaaaatccactaacaccaccaaaggtatagaaaaacgaaaatatcaaattaagatttcagtccttaacaggcagaatgtgttaaggaaaaaaagcattttcctatattccggtgtttggtttttgataatcactggggtgacctttttattaaaagaattgcccttgagtgacagaggcgtaaaaggcgatggtagtaaactgagtcccttttctgcgggggtaacccgtttgtttgactacttggtaattcaagttggtctgattgccctctctagtaggagtaacccatggatgtgatagccatcgtcaatcaagttttggctgaatttgctgctaaattcggcttgccgcacttagctttaaatcatgaaggtgtggctgctctctgttttgatgagcaccttcacctctctttgatcttaattcctgaacgtgaccagctcgttttacagatagatgtcgctgatatcactgcggtcggagaggggattttccgtcaattagccagctttaatcgtcattggtatcagtttgatcttcactttggttttgatgagtcaacgctgatggggcagctttatcggcaaatgtcagcaagtcggctgaatcaggctgttttttgagagagtctttcaagtatgttggatcatgctgagttttggcaggaattattgcaagctcaat

SEQ ID NO: 4223 - DNA, 659 bp, Photorhabdus luminescens
  misc_feature (482)..(482): n is a, c, g, or t
cagttctggataccaatacacttagcttggtgatccgtgaacccattggtgttgtcggacaggtaattccctggaatttcccactactgatggcggcatggaaactggctcctgctcttgcagcgggcaataccattgttattaacccggcaacactgacatcaatcactctgcttgaattgggcagaatattggataaagtcctgccagccggggtagttaacattgttacaggtcgtggttcagtcgttggtcaagccattctggatcatgaagatgtcgaaaaagtggcattcactggttccaccaaagtcggttataccgtagccgaagccgcagccaaaaaactgatccctgcaacactggagcttggtggtaaatcagccaatattatcttccctgatgccaatatgaaaaaagcagtaaaatatgcggccaaagctattttgctgaatcagggccaagcgtgtgaatcaggttcncggttgttcctgcataaagatattcatgatgaattcctcaaatcgctgaaaacagaattcgaatccatccaggttggtgatccattgaaaaagatactcagatgggaagccaagttagccaggaacaaatggaaaaattctcgaatacttggaaattgcgaaaaaagaaggtgcaac

SEQ ID NO: 4224 - DNA, 747 bp, Photorhabdus luminescens
taaataaaattcatcatgatgccacttctgtatgcgcacgctctgtacgctcattgagatcccgtaatactttcagttcctgttctgtgggcggttgcgtcgtgtttaatactgaggctatccgcaacgaccaaccagtattctccagaacctgctctgtcgtgacaccggggtgaaggtaagtcataaccagctctttggtcaccggatcgggctccagaatccccaaatcggtaatgacagcccgaggccctccattggtcaggtcaagcttttcacgcgaatctccgccttgcaggtaacctggtgaggtgatgaaatccatgtgttcaacaaaagaacggctgttttgcttcagaatgatcaatacttccttgcagttagtgctgatttccggtgcaccgcccgcgccgggcaaacggactgtcggcgagtgataatcgccaatcaccgtggtgttgatattggcgtatttatcaatctgagcggctccgagaaaccaacatcgatgtgttcaccctgtagccagtaacgaaacatctcaggcaccgaaaccaccacatcagccgttttctgccaggtccccatcaccgatggacagaggcagaacgtcaggtttcgtgccgatggtgccggattcatagatcaggacaatatcgggcgtgcgggtcaggcgagccagattggccgctgcgctgggcataccgatccccacaaaacacacctgaccctctttgagcattcggg

SEQ ID NO: 4225 - DNA, 654 bp, Photorhabdus luminescens
  misc_feature (403)..(403): n is a, c, g, or t
  misc_feature (654)..(654): n is a, c, g, or t
taattcataaagattagtacagctttgcccagtgtcccgcccattctctcgaaaagttcactcactgtcattcattacactatgtggtaaattggttataaatcgcaagttaggacgatcgtaatagaaattccctgtttccaagtcatcagcaatcaatcagttatgatacctatcgtgcaatatttgtttttgtagttcaggtggcatagaagggtgattaaggtcgataagtccgaggggggacatttccactaaaaagaagtttaagtttagaatccgcaattctttattgattggatatgattatagtttccatgaaacactttccagaaatactgtaatatgaattatcgcatctggtttttattgaatttaagcctctcagtttttatactatcgntttttctgtcttacctctccgttaatgtgacaaaatattttttctttgctataaaaaacacttgaaataactatgcaaatgataagttttaatttcaacattctaggcaggaaataaaaatgacaaataaccgattgctatgatttccatggggataaccattaagtaacctgtactgatataaagcccaagacattatatttatcttgatgaattaacgatcttgtaataaaagataaacggtgtgtaan

SEQ ID NO: 4226 - DNA, 770 bp, Photorhabdus luminescens
  misc_feature (655)..(655): n is a, c, g, or t
  misc_feature (678)..(678): n is a, c, g, or t
tgcatgccagacaacccgacattgcctctttcacttcgtgagaaaagtcatactccccacgccatgcctgccaactattgtgagtcttctcaatcaacccacgcaaacttggtcgtttttgttctaatccctgtttcagtaacgtcggatctaccccctgttcagttaaaagacgcagccattcacgcaccagtgtcgcgcgtcctttcggtgaatggatacgttgctgactcactttcattgatggacacatcgggctttttacatcgaaattaaaacagagcccattcccattacactccatagcaccacggaatgtattcctgacatttatcggaattgtccgatcatacgttcctcgcttaacagcatcgactttcatcataggggcatcaacccccatcggcggacaaattttgcccggattcaaacggttatccgggtcaaaggcagccttaattcggcgtaattcttcatacaagatgctaccgaaaaatgccgggctgtattcagctcgaaatcctttaccatgctctccccacaacaaaccaccataacgtgcggtgagactgacaatttcatcagaaatctgtttcatcagtatctcttgctgaggatcacacatatccagcgccggccgaacatgcagcacccncgcattcacatgaccaaacatanccgtattaagatgatggctatccaatagctgcccgaattcccacatataatcagcgagatactgtggcggtacacacgtatcttctacaaag

SEQ ID NO: 4227 - DNA, 685 bp, Photorhabdus luminescens
  misc_feature (558)..(558): n is a, c, g, or t
  misc_feature (608)..(608): n is a, c, g, or t
ttgatgtggttaagttcgatcttgagctgaatttgtttgaggtggagggcaggattactggctatctgaattatgccaccgctctatttgatcaagtgaccattgagcggcaggtaggctatctccataccatgctgcgggagatggtagctaatcctcaacagacggttgggaaaatcgatattctgaccgtagcggagcgcaagctgttattggaaacccggaatgtcattgaaacccggtatcctaagcagttatgtattcatcagttatttgaacaacaggtggagaacgagcctaatgagacggcagtggtatatgaagaacacaccctcagttacggcgagctcaatgcccgtgccaaccggttggcgcatcaactgatcgcgttgggcgtcataccggaccaacgggtggcggtttgcgtgtcacgttcaccggcaatggtggtgggggtattagccgtgctgaaagccggaggtgcctatgtgccgctggatccggtctatactggggagcgcctgacacatatcctgaccgatgctgcccccgctattntgctggcggataatgtcgggcctgatgtgctgggagaggacgcactgccnaggttaacggtacttgacccaatagcctgcctgatcaccggacagtacccccaagtgccgggattaccgcacagata

SEQ ID NO: 4228 - DNA, 756 bp, Photorhabdus luminescens
  misc_feature (672)..(672): n is a, c, g, or t
aagctttacgataaccttctggcgctggcataccgaaattacggcgaattttttctttggtttcacggcctttttggtgaccaatcaccatcactggacgtccatcaatacgagccagaccacccacaattgctttgtcatcagcataagcacgatcaccagcaagctcttcaaaatcagtaaaaatatgctgaatatagtccaacgtataaggacgacgtgggtgacgagcaagctgagcaatttgccaggcacctaaatctgaaaagattttgcgagtcaattccagacttttttcccgcaaacgttgtacttcttcatccagatttatatctaatttttcaccttgacggctaactgcggttagcgaatcaattttcgcttccagctcggcaatcggctgttcaaattcaagaaaattcagactcataacattcctaattttagtcaaattctaattctacctgctcattacccagcagagttcgcaaatctgtcagaaggttatccgttggcgttaccctccacgtcgcgccaaatcttaaacgggcgcgggcgtctttcctctggtataaagatgaaccggtatcgttcccgacgatgtgggtccatgcactacgaagacggctcaaaattgatcatcaatttgcctgtctgacagcgagatagcangcccacgcgcatatttttcacgcgcttcactaatatccattaattcacgggctgtcattttaagaccgccattgaatcatcaag

SEQ ID NO: 4229 - DNA, 674 bp, Photorhabdus luminescens
  misc_feature (578)..(578): n is a, c, g, or t
ttattgcactccgcaaaaaacagactgtgcctgaatagtagtcacctttaacttctagctctttaatcagttccggtgcttgattaagaaaaacttccgatagaatttttccgtctttgtcttgtacaccttgagtagaacagaatccaatcagtttttcagcctgtagtttgatagctaattgagtagcaacatcttcaaatgccagattaaaactctctccggtgacagaaactgcgacagggccaattagcacgattgcgccattgtctaattgacgatttatggcatgctcatcgatacggcgaatttttccgctgtggcaataatccacaccatcatcaacgccaagaggttgagcaataatgaagttaccactgacaacattaatgttggcaccttgtaacggggtattattcaaattcatagaaaggcgtgcagtgatatccagttgcagcaagccagcagattgttggactaattctatgttttattatcgggaacacgggtgtgtttgtggaaacccgttcctaatgatggtctgcaagttttgctcaatttgaggcctggcaccatanacgacgaccaggcggatgcctaaactatgcagtaattctatatccgtggataatattggtaaaatttccgtgagccatagcctctccaccaagcag

SEQ ID NO: 4230 - DNA, 731 bp, Photorhabdus luminescens
aagcttctactcacggtgtggctaagtttgctccagtggcctgtgccggtcctttgttgtccgcagagttagaggcattgggtaaagcgttagataatccagcccgtccaatggtggctatcgttgggggctctaaagtttcaaccaagctgaccgttctggatacgctgtctaaaattgctgaccaattgattgtcggtggtggtatcgcgaatacctttgttgctgcggaaggccataatgtcggtcgttctctctatgaagacgacttgctcccggaagcgaagaaattgctgataagctgtgatattccggtgccaaccgatgttcgtgtggcaacagaattctctgaaacagccgaagcaatcttgaaatctacccacgatattaaagatgatgagcagatcctcgatctgggggatgaatctgctcaacggctggcggatattctgaaaacgccaaaacgattctatggaatggcccggttggctatttgaattccctatttccgtcaggaactgaattgtccgcgcgccattgtgaagtgatgcctctctatcgcggggcagcattaccctgcacgatcaattgttcgtttgctgacaaatttttattatctcgggtggggtgcttacctgatacccgaaggaaaaactgctgcagctgtatgttggacacctccaaccatgattactctgacggtagcggcgattgattgctcccgtctaaag

SEQ ID NO: 4231 - DNA, 683 bp, Photorhabdus luminescens
gcaacgtaaccaagatggttctctggtgacaaaaatggaagataccaaaacgcgctgggcggtcacgggacgcactgaatatgacaataagggacagacgatacgaacttatcagccctatttcctcaacgactggcgatatgtgagtgatgacagcgccagaaaaggggcctatgccgatacgcatatttatgatccgattgggcgggaaatccgagttattaccgcaaaaggctggctgcgacagagccaatatttcccgtggtttactgtgagtgaggatgaaaatgatacggccgctgacgtgattatgtaattgaacccatattcgctcgtttaatgttaacgagcgaatataaactacattgtgagttctaaatagaggaacaggatattttgttaccttttattcataagtaataaactcccattcctgaaaaatctattatcgggagcatttaaaacatttgacccgtgtgggctagtgcacccaacaaataactcactttcaagatgacagatatatatacccacttatccaagctcttcttgctgtccaatgacatttcaaggacatggaatctgagtgaaccatttcttgggaatgtccacttggcgaaatgttgtttgctacccgccgaccattataaactgcataccatccttgacatatcaaaccatcc

SEQ ID NO: 4232 - DNA, 759 bp, Photorhabdus luminescens
  misc_feature (430)..(430): n is a, c, g, or t
aagctttacgccatgttttcgcacaagcagatcaaaaagcagatttagtcatcagcagtggtggcgtttctgtaggtgaagcagactacactaagcagatactggatgaattaggcgaaatcagtttctggaaactggcaatgaaaccgggtaaacctttcgcttttggcaaactaaaaaacgcctggttctgcggtttgcccggtaatccagtttcagccgttctcactttctatcaattagttcaacctttaatcgcgcgtctatccggttttacggcatggcaaccccctatgcgtatgcgcgccaaggtcaccacgccattgaaaaagagaccgggaagaatggattttcaacggggcattacttcggtgaatgaacaaggtgaactagaagttcgtacaacaggacatcaaggctctcatatatntagttcattcagtcaggggaactgcttcattgttctggaacgtgaacgtggacaggtagaagttggtgaaaatgttgaaatcgaattgttcaatcacttactgaaaaatgataatgaccattgaacttacagatgcagaaaccctacgctataaccgcccaattgttctacgcggggtcgattttgacggtcaggaaaaattgaatcttcggcgatcctgatagttggtgcccgtggtttaggttgcgccacaatccatatttgacccagtcagggtggaacataacactgctggattttgatcccggtgtgtcttgacttgcacggaa

SEQ ID NO: 4233 - DNA, 679 bp, Photorhabdus luminescens
tgctggagcggcgagatgtgattgtcgttgcgtctgtatcggctatttatggtttgggtgatcctgatagttacctgaaaatgatgctccacctgaccaacggtatgatgattgatcaacgctctattctgcggcgtttagctgaattgcaatatactcgtaatgatcaggcattccagcgagggacatttagggttcgtggtgaagtgattgatatctttccggctgaatctgatgagcatgccctgcgggttgaactatttgatgatgaagtagaacggttatcactgtttgatccgctaacagggcaggttcaatatcatgttccacgatacaccgtttatccgaaaacccactatgttactccgcgtgagcgtattattcaggcaatggaagcgattaaaattgagcttgagcagcggcgtaaggcattgctggcaaatggtaagctgctggaagaacagcgtattacgcagcgtactcaattcgatttggaaatgatgaatgaattgggttattgctcccgcattgaaattattcccgtacctctctggcccgactgaaggggaaccgccgccgacactgtttattatctccctgctgatggttcgctggtagtggatgaatcccacgctaccttcccgcaaattggttggatgtttcgaggggatcgttctct

SEQ ID NO: 4234 - DNA, 739 bp, Photorhabdus luminescens
  misc_feature (678)..(678): n is a, c, g, or t
tgcgataccataacgaaagaattgattcacaaacttaactaagactactgcatgattaatacagaaaccttcgacacccacacgcccatgatgcagcaatatctccgtcttaaagcacagcatcctgatatcctgctgttttacagaatgggggatttctatgagctattttatgacgatgccaaaaaggctgcaaaattgctggatatttccctgaccaaacgaggtcaatccgctggcaatcctatccctatggcaggcgtgccacatcatgcagtagaaaactatttagctaagctggttcaattaggtgaatcagtcgctatctgtgagcaaattggcgatcctgccaccagcaaaggcccggttgaacgtaaagtcgttcgcatcgttactcccggtaccgtgacagatgaagcgctattacaggaacggcaagataatctgctggcggctatttggcacgataatcaaggctttggttatgccacactggatgtgacatctggccgcttccaaatatctgaaatgatagagctggaaacgatagccgctgaattgaacgtagccgtcctgttgattactctatcctgaaagttttgagcatatggcgctaattgaaaattttcatggcctgcgcccgtcgccctttatgggaatttgagctagataccgcanaacagcaattgaacctggcatttggtacccgtgatctcgttgggtttggtgtggataagca

SEQ ID NO: 4235 - DNA, 656 bp, Photorhabdus luminescens
tgatatgttgcaacgcgctgaaacaacagcagtatttcagctggaatcccgtggtatgaaggatctgattaaacgtctgcgtcccgattgcttcgaagatatgatcgcgcttgtcgctttattccgtccaggtcccttgcagtcaggcatggtggataacttcattgaccgcaaacatggccgggaagagctctcatacccagatatacagtggcagcacgaatctctacagcctgtgttggagccaacttacggcatcatcctttatcaagaacaagtgatgcagattgctcaggtgctggcgggatatactctcggtggtgcagatatgctccgacgggcgatgggtaagaaaaagccggaggagatggctaagcagcgttctgtttttgaagacggtgcaaagaaactgggtattaatggcgaactggcaatgaaaatctttgaccctgtagagaagtttgccggttatggatttaataaatctcactctgctgcgtatgccttgggttcttatcagactttatggctgaaagcccattacccggctgattcatggctgggtaatgactgcggatatggataaacagaaaaagtctttggttgattgatgaatgctgcccatggggctgaaatcttccacctgattcaatagg

SEQ ID NO: 4236 - DNA, 757 bp, Photorhabdus luminescens
  misc_feature (615)..(615): n is a, c, g, or t
  misc_feature (757)..(757): n is a, c, g, or t
tggtctatacagggtatcaaacgcctgcaacaaatttgtaaaaactacaacgtgagctgtagcagctcgcctaaaaaaattaactggaacaagctactaagtcgtgttgacatcatcccaacccattttgttgccactcaggccgcaacagaatctggttggggaacatctaagcttgcacaacagaataacaacttatttggtatgcgttgcggtaacaactgtaagaaaacccaaggtaaaataaaaggttattccgcctatccgactatcaatgattcggtcaaagcctatatgagaaatatgaacacccataacgcttatgaatcattgcgtgcttcacgcgccaagcagagaagccttcaggaatcactcaataccagcaaattgattgataatcttgaaggatattcacaattgggttcgacttacaacaactacctgcacaaagtatttaacagcaataaagggcttattactcaggcgcagaagttagctaaaaacgatcacgactaagagcctgagtaagtcattagcatgaatatcttgtgtttgaatatttgtgctaagtaccaaaatcatccgttaccataaccaactatggaacggatgatnttcttatgtccaccggtttattcttttcattgatagaatgtttaggttaaatactataatatcactcaatcttatattgagataaaatgatttaccagagtttaatatgaatttcttttcttttgaagttcttgggtccttn

SEQ ID NO: 4237 - DNA, 677 bp, Photorhabdus luminescens
  misc_feature (650)..(650): n is a, c, g, or t
tacccgtaccgcccgcagagggtgtgccggggaccattccgcaacccttgacaaaaaatccaccgcttctcagcacttcccgctggtcgtttttacccagctatgaagactgggtcgtcctcgggcaggaggtggcgggtctggccgaaaatgggttgaattatgtccgcgacagtactcgggagcttcttgcccaatttggttcatggctcaatcaaaccggcaagtgggtgtgtgaagagattattgacccgataagccatcaggtcagctacgctttttcctgggctaatgaacaaacgggaaaaatcgtgacttggacggagagtgagataaaagcccggtggcagacggtgcaacagggttcagacgtcaccctggaagagcttaaaaacattagctggatgcagatatcaaaagaggtgggggaaggcatgctggaaatggtggtgattgttgccggagttgccgttgttatccttgtcacccttgccgtcgctgccgcactgattgcactggtggaaattttagctgccgctgccgcagttagcgccgccgcgttagccgccgccctagcaatattggcgagtgtgacattcgccaccgcttcataattaacggagagaaaatatggacactttagattactntgcccagttgagatcacaactgacctt

SEQ ID NO: 4238 - DNA, 734 bp, Photorhabdus luminescens
cggttgcttcgattgttgggaagagtcgtcatgttggcaacacaataggctcaagcaaaacgaaagaaactcagatatggacagaaacgaagaaaaaagagcctgtagcaaatgcttacggccactgggataaacataaaagtgaattccctgaatatcagaattcaaaacaatatgtcgaagccacccataattttattaaaaatcctccaaaaggaactttagtcaaaacccgagctaatggtgataccttgtattacaatccaaaaacaaatatttttgcagtaaaaaatgtggataatgtcccgaaaacaatgtttaaaccaaatccagtagatcatggatatgaaacaaatttggattacttcaatgcacaaaaataatagattatatgtatgccgtgtgtgtggtgcagaacagttagatcctccgtggggtgaagatggtaactcaccaacatttgatatctgtgattgttgtggggtagagtttggctatgaagacgctattttagcagcattaaagaattatagatccaaatggttggataaaggcgcaaaatggaactctgaaaaatccaagccaaaaaattggtcgctagaggagcaactatcaaatatacctaaagaatattcgtaaaaattaagagtatgcacatggatttgggtgatctctcgtaataaaatgaccactctccctgtgttagaatacctaacacagggaattatagccat

SEQ ID NO: 4239 - DNA, 660 bp, Photorhabdus luminescens
  misc_feature (395)..(395): n is a, c, g, or t
  misc_feature (407)..(407): n is a, c, g, or t
ataggcatgaaaggtgtctaaatcatggcgtaatgtccccacgacgcgggagaccagatgcataacaaaagagtagcgatcaacttttgtcagatccgcgacatagcgactgcccggttcacaaatgcgggccaggtcattacgcgccaaatcaactaacattaagtgctcagctagctccttatgatctgttcgcatttccagttcggtccggctatcaagatccgcatccagctcgccggccgcattgcgcccacgggggcgggtgccggcgattgggtagatttcaatttggcgattggatgcatcatatttaagcgcgctttcaggagacgcgccaaacagacagaaatctttgtcctgcatgaaaaacatgtagggacttggattgtggnacttaagttttngataagcatgaagtggtgccgggcagggtaaaaagaagcgtcttgatggcactactctgaaaatatctcctttggcggacgtattggtgcaactgtgccaccatttctgcatagctctttgtttccctgatcgatgaaactttcatggttggcagagagatttgttgtaccggctcactgggctcggtaactgagagccactaatgtttccaatccgttgtctaaggcctgtctcttttagcttgagattatt

SEQ ID NO: 4240 - DNA, 734 bp, Photorhabdus luminescens
  misc_feature (587)..(587): n is a, c, g, or t
  misc_feature (656)..(656): n is a, c, g, or t
  misc_feature (693)..(693): n is a, c, g, or t
gcacagaaaagcggtttaatcgcaggacagggaatcgattttgtccagaaatttacctccgcgatcctcctatggtggggggtgaccgaagtcttacgcggtgaactgactccggggcaacttatcgccttcaatatgctggccggacacgtcacgcaacctatcctccggctggcacaggtttggcaggattttcagcatacgttaatcgcgttgaaacgtgtgggggatattcttgatgagccaatggaaaacagtaaacagggattggcttctgtacctgagctggaaggccaaattgaattcaaaaatattcgcttccgctaccatgacgatacaccggaagttctggcgaacctgtcgttattgataaaatcgggtcaatttattggtataactggaccgtccggttcaggtaaaagtactctcacccgtttgctacaaaggttatacgtacctcaacatggacaagttttgattgatggcatggatttagctattgctgatcccgtctctttacgccgcaatatgagtgttgtgctccaggaaagtatcctgttttctggcagcatcaccgataacattcngctgtgtaagcccaacgcaacagatgcagaagtctatcgtgccgctgagttagccggggccattgaatntattcaatcccttcctcacgggtttgcgcatccagtnggggagaaagggagtcatctttcaggtggtcaaagacagag

SEQ ID NO: 4241 - DNA, 659 bp, Photorhabdus luminescens
  misc_feature (659)..(659): n is a, c, g, or t
tctgcgcgctaaaattgatatggcatccccttttattgtgatgcgtgatccggttttgtaccggattaaatttgcagagcatcatcagtgtggtaacaaatggtgcatctacccaatgtacgattttactcactgtatttctgatgcgcttgaaggtattacacattcgctgtgtacgctggagttccaggataaccgccgcctgtacgactgggtgctggaaaatatcaccattgattgtcgtccacgccaatatgaattctcgcgtttgaaccttgaatatacggttatgtctaagcgtaagctgaatctgctggtggcagataagattgttgaaggttgggatgacccacgtatgccaacgatctcaggcttgcgtcgtcgtggttatactgccgcgtctattcgtgaattctgtcgtcgtattggtgtcaccaagcaggataataatgtggaaatggcagcattggaatcttgtatccgtgatgatctgaacgaaaatgcgcctcgcgcaatggctgttcttgatcccgtcagattagtgatcgaaaacatgccagaaggggagcagattttgagtatgcctaatcatccgaacaaaccggagatgggcagccgtgaagtgccatttattcgtgagatctatattgacccagcan

SEQ ID NO: 4242 - DNA, 735 bp, Photorhabdus luminescens
  misc_feature (539)..(539): n is a, c, g, or t
  misc_feature (565)..(565): n is a, c, g, or t
  misc_feature (735)..(735): n is a, c, g, or t
cccttcattttcatattccactcccatcattgatcaacgggtattaataagcttttatatgcagccctgtgatttcagttgattgtgaaaaacaaaaaggccacgccggagcgcaaccttgatgttttaatataatatgataattgaaggatatgttaatctaccaatttcaattattcatcaaagaaattcaattcaatttctagtgtcttaccgactgattcaacaaataacgcttctaattctgatgagtcatcagttttagtatacaaaagagtcaataaatattttgtttcagctacccctaaatcatattctttacctaagcattttacaattaatctttttgaaccaaattgttccttgattttactggaattatcttctacatgaataacaaaacaatttggaggagtgctagctgtatgagctacatcgaattctataatattttttaggagcaatgtattattactgatttcttcccattttcccatgctatatccaagtgaataattaagtttattagcgtaaccaanatattcggttttcatactagaggctntaccaacagttaaccttgctttcagttgatacgcaggttcaatatgcggcttaggtttaactggtttttctcccacaaattcccatcacaagccatcatatcttcttgcgttggctgccacggtacaaaattgccatgctcattacgcagatcaatatgcgtcaaatatn

SEQ ID NO: 4243 - DNA, 652 bp, Photorhabdus luminescens
catggtccgatgttcagcttgaagatcctttgggtatggaagtaggttatcgtctgattccgatggttgattttcgccagaatggtgaattactggggaggatcagcggcattcgtaagaaatttgctcaggagatgggatatttaccgccggttgttcatatccgggataaccttgaactggccccagcgggctaccgtattctgatgaaaggggtagaaattggtcgtggtgaagcgcatccggggcgctggctggcgattaaccccggtggtgccgtgggggaattgccgggtgatatcaccaaagatcctgcttttggcctgtctgcggtttggattgatgatagcctcagagagcaagctcaggttcaagggtacacggtggttgccgccagtacggtggttgcgacccatatgaatcacctgttgacgcaatatgcgaatgagttatttggtcgtcaggaagctcaacaactgtttgagcgggtcagtcaagagatgcctaaactgaccgaggactttattcctgatgttgttaatctgacaaccttgcataaagtgctgcaaaatctgttgtcccaaccagtgccgaatcgagacatgcggacattattgaaccttggctgaactgcacctgacaactgacctta

SEQ ID NO: 4244 - DNA, 761 bp, Photorhabdus luminescens
  misc_feature (530)..(530): n is a, c, g, or t
  misc_feature (632)..(632): n is a, c, g, or t
  misc_feature (700)..(700): n is a, c, g, or t
  misc_feature (727)..(727): n is a, c, g, or t
  misc_feature (761)..(761): n is a, c, g, or t
aagcttaccaatatgaccaatagcctgaccatatttttgtgtatcaataacacaaaaagcacaattggtattactcagaatacccgagtcaccaacttgtccaccagattcagcataaaaagcggtcttatccagtataacaatcgcttcttcgcccgcctgaatttgattgactgattcaccatcacggaagatagcagtcactgttgcctgctgttcgttatgatcgtaaccagagaaatcgctgcgttcatcaactttgatcaattcattataatcggtaccgaaaccacttgattcacgggctcgacgacgctgattttccattgccactgcaaatcccgcttcatcaacgctaatattacgctcacggcaaacatcagcggttaaatccacagggaaaccataggtatcatacaaacggaaagccgtttcgccatccagaatatcaccggacagttttgcgagttcatcgtctaataattgaagaccacgttccagcgtacgagcaaactgctcttcttctgttntcaagatctgctcaacaactgcttgctggcgtttaagctcttctcccgccgcgcccatcacttctagcaatggcgcaaccagtttatagaagaaggtatctntagcccccaacatgttaccgtgacggatagctcggcggataatacgacgcagaacataaccacggttntcattagaagggacaacaccatcacanatcaaaaatgcacatgaacgaatgtgatcagcan

SEQ ID NO: 4245 - DNA, 673 bp, Photorhabdus luminescens
gtaacatgccttcacaggcgtgcaatacatattgaccatttagcgacactgccgccgtgtcatctccgggataggcatataagctatccaatgaatccatatggcaagttgtgtcaattgaaacattgtgagcaatcgcctgcttggactgcattgcaggtgtatgttttaacatttcgagtaattgattgagtttcatcactgcgtctccttttgcatataggcttgcattgggacatgcggtaatggatagttttcaatctgtgcctgcatcagcacatgtggaatgttggcaatggttaactgacgcaaactatcccaacacaacctttggaaatagtgttcattttgactttgcacggtggctaaaaaagtacggcatcctaagtgcttggcggtcgataccgcggtattgattaacgctttaccaatgatatggcgacgtcgatataaaggttctacgcataaacgcccgccataccatgtctgttcgccatccgggaaaatccgtactgcgccaatcactcgatcatgcccacccaacattttctcaatggcaacaatgcctaatgctttaacatcgtattcgtcacgatcttcttgcaagattttctgttcatcgcgaaaggtcatttcaacgcaaccataatattggcgacgctcccaatcttcg

SEQ ID NO: 4246 - DNA, 753 bp, Photorhabdus luminescens
  misc_feature (721)..(721): n is a, c, g, or t
tagccgctttctctgtaccgtttttcgcaatatgcttatcaatccaagccacagggaattccgccagaatacctaccggtggaacgagcacttcatatttatcctcaccatactgcttgcgaatgttgttcacttcagattcgaaactgatcagtacatcgcccaaaccacgctcaataaatgacgttgttgccccgcgaccaccagtatcaaacacagcaacatttttcaggaaacgttgcatccattcgcgagttttaccctgatctccaccattttcctgttgaataaccccccaagcggccaaataagcataacggccattaccggaggttttagggtttggcaagactaatttgacatcctgacgcactaaatcatcccaattacgaatatttttggggttacctttacgcacgagaaacgccatcgtggaatagtaaggtgaactgctatttggcaggcggttctgccaatcagccgagatcagattgccacgatcatgccaaatttgcacatccgttacctgattgtaagtcaccacatcagcccgcaatccttgaagaattgccagtgcttgtttggaggagccagcgtgggattgtttgattatcaacttatcttgtggatactgctcattccactggttttcaaattcaggattcaatgccgaaaataactcacgcgcaacatcataagagcttgttaatagctctacagncaaggcatgactgctgcctaataaagttactt

SEQ ID NO: 4247 - DNA, 677 bp, Photorhabdus luminescens
ttgaacgagtagatcgaggattaattaccagtacaaaagagagtcatactgctgccgaaaaatttgccagtgaaaccaataacagttatggcgtgatggcgcatatgcatttggctcaacttgctgttgaaaagaatgaattaactaaagcagatcagtttttatctgcggctaccggccaggtaaaaaatgaggatttgcaggctctggtgaatattcgcctagccagggttcaattggcggaagataaagcggatgctgcgctgaaaacattggaacaggtcaaaggttccggttgggttggcgttgcagaggatattcgcggtgatgcactggtgaaaaaaggtgatattgctggtgcccgcgcagcgtataccaaaggtttgagctcaaattcaccacaagcgatcaaatcgatgttaaatcttaaattgaataacttatccagctaagggggaattctttcaattgcacttgcgtaaaacactcttggttgggtttggtggcttccgttctgctagccgggtgttcaacggagcaagatacagtaacgatgtcaccattgccacaggtcgaaaatcaatttaatccaagcggaagtttgggataaatctgtccgtgatggtgtaggccgttattattctcactagacgccaaccttgcaaggcttcgctgtt

SEQ ID NO: 4248 - DNA, 773 bp, Photorhabdus luminescens
aagcttcctttttcgccccaatgttcgcacattgggattgataaatagcttgtttccctctttcaataaattaaattttgcattttcaaatatagcggaatttttctgctctaccttgacatcattccccaacgatttcagattaatgcctgaaatccgcggcactcttctgacacgctcacctgaactgttcgacgttggtatcaccctatcgtcagattgtcctttggcaaactttgaagtcgttaaaacgccggtattttccacgcgaatactggcatttatctgtagacgatcaaccgcttgtttagcatcatccaacgcttgtagctcttcttcggtcaatcctttgtagaattttttttcagcttccggtattaattcgggatcaatatagctaccggtttcccccgcgcctgtcgattcatagccattaccagacaaaccactaccaccggcaccggtacgatcaggttttgaatcgctctgttttgcccctctacatcttcttgtacctgggcaattttattttcagccgcagcaatatcacgtttaccccgatattccgccccctgataggcgatatttgcatcatttttccgccttttcggcccgttgttggtgcaataatgctacttcttttctaattctgcttttttctgagccgctgcaatatcttgttttgcactggcatgatgctgttcactttgtgctacgccgacctcggatttcttcaccgctccttttacgtgttgttggttataccgaataga

SEQ ID NO: 4249 - DNA, 688 bp, Photorhabdus luminescens
  misc_feature (582)..(582): n is a, c, g, or t
tactgtccgcgggaagctggatgttcaaaataaccgctgtattcgtcaggtacagtggttttttgtttgatcaatttgtttgatcaaatagcactgagcgcaggcccttccttcagataggggataagtagttatcggagtgtgtaaacttgacgttaaacactccgaattttttgacattaagtggatgtcccgccgtaaccgaatagcggctggcgtagccagagggcggggagataccctcttgtatgatttaaagggatttttgatgggaaaagcatctaatagaagtgcagtgtacctctttacaggaagatattacgacgataatggcggtaatcgtattactgctgttggggctggtggtgaagtttatgcttatggcggaaatgatgatgttaccgttggttcatttaaagtcgatgtataccatacagatggcgaccttacggtaaagggagtgtcaggttataccggtattcataaaacgggaaatggcgggctgtcatttacggcggctgccggtgtagctgctattgatcacacgggtgaaacgggaaatttaaattattcgggtgcggnccgttattataaactggtccgcaaagggttgcctggtgatactcgttttagatggggccggggatacaatcagttatggcatgaaactaaccggggaaattatatt

SEQ ID NO: 4250 - DNA, 756 bp, Photorhabdus luminescens
aagcttcgctcattttgggatatgggtactataattggcgtaactcagtccttttagtgatttttggcgattgatcagaacgccaaaattggactaagctcccttcaaggaatctattattttgaaaaattatttaaatttcttgatataatgttacataatacatttgcctataaatcggctgagataaataaacatcatcaaactcatgtttatcatgcagtactttgtccctttcagccttagctatttcatgttgtagaataatagctacttcacttttatttaatttctcagaaagaattaatggaagattaaatttcacccaagactatcgcctggaaaatctttcctcgttaagctggtggcatatcactttgacaagtgacttagatttgacaacggaatcatctcgtagaaatattgcataatgagattactcatattcaagcaaggtaactatttgaggctatgcatgccaaagcgtacagaaaaacaggaaacaacccaacatcagccgaaaaggttatccaaaacgcctttggaaaagggaattcgtcacggtaaaaaagcgatttctctgacggtcagagtaggaaattatatccgcactattcctattatcgctcattttatccgtgcaacgctgcgttttaatgatcggatgggtaatcaagttggcgcggcaataacgtatttttccttcttatcacttatcccaattctgatgctctctttcgccattgccggttaatt

SEQ ID NO: 4251 - DNA, 676 bp, Photorhabdus luminescens
  misc_feature (521)..(521): n is a, c, g, or t
  misc_feature (676)..(676): n is a, c, g, or t
ttcaacgcattggggtttcgttgggaccggtctgcggctcctcttattgttcctattcattctattgagcgggtatgcttccgctttcatcggatgctgccagaatttgtttgggatgctggtgtacttgaaggcaatccctttactttccccgaagtgaaaacattgttggacggtgtcaccgtcggcggtaggaaggtttctgatcagcaacagatcttaaatcttgcagagagtgccaggcgcttactagttttagtgaaaaccggtcaatttgaattgaccaaagccacattcgcagaacttcatagcatcgttgcttgtaatgaagctttggagtggggaatgttccgtggggaagggcaggagacaaattacactccagatgtcagtttgggcaatcaggggcgtcatacgccgttgcctactgagtctggcgcaccagaattgaatcgtgtttttcacgagggtcttgctgcattgcgtgaatgtccgccttttgaacagggagctgcattctntcttttcggggcgctacagcaatttttctttgatggtaacaaacgcacttcacgtttcatgatgaacggtatcttgatgtcgaacggcatcgatgcaatcagtgtgcctgcgggcaaactgtatgagttcaacgaaaaaatgggtccgctcctan

SEQ ID NO: 4252 - DNA, 759 bp, Photorhabdus luminescens
aagcttcttcctcatagccatataatcttacaatgtatgaaaataataagaaacaaaaataactattctcgttgatttttgcgaagctctacgcaatttaaatgtaacaatgataaactattatttttttattgatgcactctcgcataaaatttaattgtgtatttattttgtgtttaaaatgaataaaatgttttacgaaaggaaataaggaattatcaatggtaaataatgtgaatataatcggccattataatattgataatcaatcaggtttttctttattggaattaatggtcgttattgttttggtgtcaatattttccttatggggcgtacaggaatggggctatcaccaggaaagagtcaggttacaggaatcagcacagaagatattgacatttatatccaggcaacaatctttggcaaattatttgaacaaaagggtgatattgtggttgaaaactggcaaggattggtgcatagcgttctctaattcggtattagctaattgtaatttagaaaatgttgagggaataaactcaccctatcaggatgttattatcagttcagcaaccaaggatcagatagagtttcatggaataagaaacaccatgatacctgcgagttttactttggcgaattccgcaggtgaaatatccattattttttcttcacgaggtaggataagatcatgtagaataataagtctaatcaattccagcttgtgattagctaaattttcccactatacccata

SEQ ID NO: 4253 - DNA, 677 bp, Photorhabdus luminescens
  misc_feature (513)..(513): n is a, c, g, or t
  misc_feature (677)..(677): n is a, c, g, or t
tgatacccgcaaaaattgactctgcgatttgctgctggaaacgtgcggttttcagtttccgctcctcttccaaattgctaataaacgcagtctctaccagaatcgaagggatatctggtgctttcagtaccgcaaatccagcttgatccacccgatttttatgtaatttattcactttgcccatacgcttaagcacttcgctaccaaatttaaggctgtcattgattgtcgcagtttgtaacaaatcaaacatcgtatgatccagatacttatcaccgcttttactcactccgccaatttggtcagcttcgttttgcgtctgggctagaaaacgtgcggtattactggttgcacctttagtcgagagtgcaaaaaccgaagagccacgggcaactcggttagtaacagcatcagcatgaatagaaacgaagagatcagcccgcatcttacgcgcttttgccacccggactttgagcgggataaacacatcttcattacgggtcatatagactntcatacccggttcacgctgaatgagcgtttcaatcgacgagcaatttgcaaaacaatattcttttcacgagttttatatttgccaatagcaccaggatcttcaccaccatgtccaggatcgagcatgataacaattggtctgtctctacctgctttgcccgacn

SEQ ID NO: 4254 - DNA, 755 bp, Photorhabdus luminescens
  misc_feature (660)..(660): n is a, c, g, or t
  misc_feature (704)..(704): n is a, c, g, or t
aagcttcagatatgccatgcgcccgccgcgcttatacagcaagtaggcagccatttgggctactttttcttcgcaaaacatagaaacctccaagactttttcgaaataccaaactggcaatctacacatatagtgtacctctaaatgcgcaaccctgacaaggttaactctaataaagtcaatgagttagaaactatatgcctgatatataaagaattaaagattctttatctttaggctaaaaaatgtatagcaaccaacacaacccaaaatgttgctgtatgatcattgttgatcttcggtatatatcctggctgaaataattgccccaccaatctcacgggttccgtataatataggaacgggagaaacaccgaatgaattatttaagggaatacaaatgtgtttacttccaggttaacaatgttgcacttattatgtgaatctaccgagaattagtaaaagcattaacaaataaaactcagaaataattcctgaataaaaatccccaaaatggcccacttttctgtgagccaccttattaaaacttttttactgatttataaagagctgattaagcaaatttccccttaccaatcgtcacatcagtccacgccgttgcgatagccgttttcgcctgactgtccagacccgcaatanaaccattatcacccactgccggagcaaaaccgctcattgcctgnatcaaagaatccacggcattatctgacaatgccgtaaattcgcgttcccct

SEQ ID NO: 4255 - DNA, 669 bp, Photorhabdus luminescens
tgcggatgttacaaaaacaggcccaccagttgcgctggcaggccccggtctacctgtggcaggtgtgtcacagtacctggtctcaggaaggtcgtatcactcagaccgtcggctgcttttttcctgaacgctgtaccccggatatcgtggcgacacagttacaaacgttggttgacccgttgcgcgagcgcgggatgcagcaactgttggagaagacggcccacgattttctttgtcgtctgtccgcgaacttgaaacaacaggggattgcgcactggcaacaggtcctgacgccgtggttagcggagtatggtgatgtggtgtcgctgcggggtttgatgttcagtttgccgcttaaagcgcagacgactcgcctcccgcagatctggctgcccgacacggcatggcagggggtgttggagggcagtcgttgtttccacggtcggcgggtgggcatgctccacacacagaccgtttgtcgtggcctgatagtgctgggcttgttatggggggccggaatgatgctctcctttttcaccaaccgtgaccagctagctgtggtgcaggcggcggtcactgacctgaaagctcacccggagaattctgatgcccagttgatggccttaaaggcgctgcgtaacgaggtggaccggctgcaagaccgggctg

SEQ ID NO: 4256 - DNA, 756 bp, Photorhabdus luminescens
  misc_feature (712)..(712): n is a, c, g, or t
aagcttaggccaataaatcagaacagcaagtgtcgtcaggccaatcagcgtatcactcacatacagcgttggcagagcttgaaacagagccacaaccttattgatataattctctggcatatgttccaattgcagaccaaaaaaatcttttacttgcatggttgcgatagttatcgcgattccagaagtaaaaccgagtgtgacgggtagcggaatatactcgatcaatttaccaaagcgggctaatcccatcaccagcaaaataatgcctgacattaatgttgcaatgagcaaaccactcagaccaaattgttgagagaccggatagagaatgacaacgaaagcggcggtagggccggaaacactatagcgtgagccgccggttatcgcgataactatcccggcgatagcggcggtataaagcccatactgtggcgcgacaccactgccgatggctagcgccatagcgagcgggatggcgataataccgacagtaataccggcaataatatctttagttaaacgagcaaaagagtaagattccttccaacaagcatcaattacagcactaaacggccgtatgccgttcattctacgagttttcatctgtgcctaaaccaaaaatatagagggaaaaaagtaataaggtcgttacagacaaattgcaaggccaaattacaaagccgaattataaaatagtgcttttagttcnaatgatagtgccatagagcaaacttatgttataagttaacggag

SEQ ID NO: 4257 - DNA, 671 bp, Photorhabdus luminescens
  misc_feature (459)..(459): n is a, c, g, or t
  misc_feature (671)..(671): n is a, c, g, or t
ggaagaggctaacgaaggcaaactcacattgaaaactcataagaggaggttaaaaaatgatatcttcatcagtccggatgagttgaaatctatccggagtaaactgaatatttctcaggctgtttttgcccagtacctgcataccggtgagacgacataccaaaactgggaacagggacgggctaaaccgaataaacaagctgtgttactgattaaaatggtggagcgcaacccgcaggcactagaatttcttgccagcctcacataacaatatcactttaattcatgtagctgagcattcacttttaacaatttcacgcaatgtaaatgggtgaaacttgacggtgatctcaccatcagtgatagctaaggtcggattaggcaaccgctcttgttcccctttgggttgactctctttaacagaaaaacctgccggcaaaggttgcggtaataatgctnttgcggctgttgataagatctcaggtgccaccggcagcaccagctccacatgttcccatccctgattgcagtaagttttcttgccacgatagggcaattctacacaatcaattctgccaattaagcaccgcaattgggtactctaaatcaaacaagcagattggacgtccattaatgatagtttctgacatcaaactgccacattgcaaaan

SEQ ID NO: 4258 - DNA, 741 bp, Photorhabdus luminescens
  misc_feature (599)..(599): n is a, c, g, or t
  misc_feature (677)..(677): n is a, c, g, or t
ccggcttgtcgtaccccatacccaatgcagtagttgccaccagcaccttaagttgattggttagcaataactcttcaagatattgtcggtaatcgttactgttttcaaaaccatcagcctcaatactgctatggtaggctctggcatttatgccattgacgttcaaccaatttgctacctgttcggcatcacgcactgttaaggtgtacacaatgccagtaccatgcaatgtgggaatcacttgcgccaaccaagctaggcgagaggattgatcaggcagcaccatagtttgtagcgagaggctttcacggatcagtggaccacgctggatctggatattacccagttgtgtttggatatcagccaccacgcggttattggcagtggccgttgtgcctaataccggtgtattaggtggcaactggcgcaaaatattgactatacgccgatagtctgggcggaagtcatggccccagtcggagatgcagtgggcttcgtcgatcaccatcagagcaatacggtcagcgataggatgaagcaccggttcaatgaagttatcattggcgagccgctcaggagaaatcagcaggcaatctatntgattatttataatcctttgtgtcaccctctgccagtcccgtgtattggtggaattatagtctcggcttgatgcgcangcgctgggcggactcaatctgttacgcatcagagccagcaaaagagatacaataatcgtcggcc

SEQ ID NO: 4259 - DNA, 668 bp, Photorhabdus luminescens
  misc_feature (468)..(468): n is a, c, g, or t
  misc_feature (628)..(628): n is a, c, g, or t
aagtagttactgatatccgttgcaatcagcactccttcaggtgccgttttagcaaagaatccaaaagctatcggaaatacaacaaaataagcaaacgccatccccaaataaaatagcaggctactggaaacaagcagagggatcatcaagcggcgttcatgcttatataacgcaggtgcaataaatgcccacacttgatagagaaccataggtgcagatacgaatattgacaccataatggtcagttttattggcgtaaaaaagggggaagcaacatctgtcgctatcatactggcaccttgaggcaactgcttaatcaaaggtgcagaaatcatctgatagatgtcgttagaaaaataaaccaacgctaaaaaaaccactaatacagtaagtaaactgtttagaattcgcttacgcagttcaataaggtgactgataagtggttgagtatcatcaacagccatgttntagtgttcaccattaacttaatcggaagtttttttctttcgtgcagaagccgcttgatcatccactagagcagaaggtccagatgaagccacaacctgagacgctgccggcttttgtgccacctcatttatttccgatgctttcatgctccctgcataangttcattttggtatgctttctctaaagactcagcagcttt

SEQ ID NO: 4260 - DNA, 731 bp, Photorhabdus luminescens
  misc_feature (507)..(507): n is a, c, g, or t
  misc_feature (647)..(647): n is a, c, g, or t
  misc_feature (731)..(731): n is a, c, g, or t
tgtcgcctcacgggattgccgggagaaacattaatcagagcatggtgaatggtatccaattgagctacaacttgacgctgaacatcatctggttggtatttgccctcagaaagggctttttgataacatgatgaaggggtaatcaatgatggcatgacaataacaatccttaaaataatcgcccgttttttatcgtttttatgattcagattgaccttattaccggatcaattgtctacaataaggtccacaataagatctataccctatggatttcaagatgcatcgcggcggcaaaggaatgaatccccgggagcatagcaaactatgtgaccggagtgagcgagtgcagccaacaaagaggcaatttgaaagatgacgggtatacaaacaaatgtaaatcatgatcaatattccactctaactagattaacggttatagtgacgataattaagtgaaacattctgcggaacaacgatgtcgatgaaggagtagctatgacttgngagtatgcactgattggattggtggttggttttgctatcggagcgctagttatgcgttttggtaacactaagctgcgccagcagaaagccttacaaactgaactggagaataataaaatagaactggaagagtatcgtanagaattagttggtcattttgcccgtagcgcagaattactcgacaatatggctcgcgattatcgtcagttatataagcatatggn

SEQ ID NO: 4261 - DNA, 652 bp, Photorhabdus luminescens
taatatctctgtattttcgcttttaaatggtcatgacagatttggtaattgatggataactgagttaatcatctttaatgcttttatacccgtcatctttcaagttgcctctttgttggctgcactcgctcaccccggtcacatagttacctatgctcccggggattcactcccttgccgtcgcgatgcatcttgaaatccatagggtatatacctgtgctcattgaaactgcttgattttcgcccaaatgaagctcatggtatcagtcatgaaaatattcattaccgatgaacaaaaagccgaacttgaacacctccatcacacctgccgtgataagagagagtgtgatcgcatcaaagcggtcctgctggcctctgagggctggagttcagtgatgatcgctcaggccctgcgtcttcatgaaacgaccgttaatcgtcatatcagtgattaccttaatcaccgcaaaatcaagcccgaaaatggcggctctcagagccatctcagcgaaacacagactcaggaacttatcgcttatctgaccgcgaatcttctgcccaccacacaggctgttatccgccttgtcaaagaagcgtgggatatcagttacactgttcccggcatgaataaatggctgcaaccatatggatt

SEQ ID NO: 4262 - DNA, 732 bp, Photorhabdus luminescens
  misc_feature (631)..(632): n is a, c, g, or t
  misc_feature (645)..(645): n is a, c, g, or t
  misc_feature (702)..(702): n is a, c, g, or t
taaaacagaaaaaagaaatgtcgctattaatttaagtaaaaactctaaactatctcagcatgcaatatcagatttaacaggtgttagtagagacaccattagaaaatacagtgctgcttaacgggctttagtaaggaaattatatggctaatactaattttttgatcggtcgtggcgaactattaacacatgatatcccatcgcctaaaagaagaatggataaatctgaggtttatacactaacagaagcaaaaaaacgtttaacacctcaaatacaaacaactaacgatatatttaaaaagctaccagcacactcctgcccgcatgattatgcagtagccaaattaacaatgaaccctagctatattgcaaggtcttatttccctacggctatgttgagaaatacagatttaaaatctgtgggtagcaaaactgtaaaaattgtacctgaaaaatggaaaagaaaaatagatgttattgagcacccaactactcagctatttgtagccggaaaacgttcagcatttagaaatttatctgagtggatcagtgaattagaaaataactctgctgaatcaattgatttcgccagaatagaagcgtttgaagcatatctaccggaagaacgttnntattattcctganatatacaagaaacacttttcgaagtaggaattcatcttcttcaaaatgatgatgagngatttgtccaacgtaaatttatcgattatg

SEQ ID NO: 4263 - DNA, 653 bp, Photorhabdus luminescens
  misc_feature (516)..(516): n is a, c, g, or t
gcagcgatcatggaagggaggtttaaaccttccgaggatggtaatctggtgctctatattggcaacgtgcacggcaataagtttgaaaacgtattccttgctcaacttcgccccgttgataaccagcgtccttccgtggtgatctctaatggcggtcatatggtggagcgacctgacggcaaacaggtggtcgtccttaatcatggtacgcgttatgaaggcactgcaatgctgcgtgattttaggatcactgagttccgtgattatcaagcgattattgggcatcagacttcaatcgtagataataataaagttgaacagaaatctattatccagttatggcaggataatgataaggactcccgtgctgagttccattggcgtttgactttggtgctctcggtactgattatggctatgatggttgtaccgttaagtgtggtgaacccacgtcaagggcgggtattaagcatgttgcccgcaatgttgctttatctgattttcttcttattgcanagctccctgcgttctaacggtagtaaaggcaaattggaccccgatgatttggatgtggctgactaatgggacttatctgatgttggcgctggttctcaatttttggatacgttgccggtgcgtaggatccgggctcg

SEQ ID NO: 4264 - DNA, 747 bp, Photorhabdus luminescens
  misc_feature (665)..(665): n is a, c, g, or t
aagcttgcatcctgatatcaatctgtccgtcgagtacgggtgagtcagcagtactttgcatatacagctcaaactcctgcaccagaaactgacctatccgcctggaggtggctagcgcatccggtgacgccatttttaccaacgtatgggccacttcggaatcaaaacgacgaccaaataagttgtcaatatattgggtagttgacttttctctgtgagcatcagcctgtaatgacagtaccaaaccatgtaactcagggtatgcctgtaactgactggcagcatcatcaaataacttgatagtttccttcgaggtgacttgtccggtgagccagagtcccctggcccgtccaatcaaaaacctcgcttccgggatattcgcggtttccaatcggctcataaaagcaatcagactttcactttcggtcttaggcgcttcccgttcagcggttgaattcgttcgggtcaacggggtaatctgccattcaataagacgattaatttcgttttgtgttataccgccttttaaaccgacaacacgtccgggtccatcaaagatgacgcgttgcgtaagatgttcagcatgttgaggtgccaccgcgatcccaagacgccagcggattcagctcgctgagcctgtaagtgctctatcattcggcccattntaaaacgtactaagttcacctgattggtgcgtagagcaaaatactttgggctatgctgttgccatcagctatcgaccgttca

SEQ ID NO: 4265 - DNA, 657 bp, Photorhabdus luminescens
tactgtccgcgggaagctggatgttcaaaataaccgctgtattcgtcaggtacagtggttttttgtttgatcaatttgtttgatcaaatagcactgagcgcaggcccttccttcagataggggataagtagttatcggagtgtgtaaacttgacgttaaacactccgaattttttgacattaagtggatgtcccgccgtaaccgaatagcggctggcgtagccagagggcggggagataccctcttgtatgatttaaagggatttttgatgggaaaagcatctaatagaagtgcagtgtacctctttacaggaagatattacgacgataatggcggtaatcgtattactgctgttggggctggtggtgaagtttatgcttatggcggaaatgatgatgttaccgttggttcatttaaagtcgatgtataccatacagatggcgaccttacggtaaagggagtgtcaggttataccggtattcatataacgggaaatggcgggctgtcattacgggggctgccggtgtactgctattgatcacacgggtgaaacgggaaatttaaattatttgggtgcggccggctataataaactcgtcctaaagggttgcctcgtgatcctccattacaggggccggcggtacaatcagtatggat

SEQ ID NO: 4266 - DNA, 755 bp, Photorhabdus luminescens
  misc_feature (602)..(602): n is a, c, g, or t
ttgtgattagaacggtggtaacagtactgtgttgtagttttgcagatcttggtactaagaatgactgatcgaatatcttgtaccaagagagaggatgttcttgctgctatacctgttatctttcaagttgcctctttgttggctgtactcactcacccctggtcacatagttcgctatgctcccttgccgtcgcgatgcatctttgaaatccataggtatatttgaggcagatatgcgaaatggtactggtcaaatagttactgttgttacaattaaatctatagttgatgtagatttcatctgacatttagtcgtaaaccaagttgattacaaatttgctttatgctagcaatagtttcggatggtattgttgattaatagcttctctaggtaaaagtcgttcaatgcggtatttttagccttggttttgtcactggattgactgttgaacattgctattctcatatcagaatttagtcgtggtaaacctgatatcggtatcatacgcgggtacagaaaaattgatgagttgatatttaatttggttctccatcagccgctcattattgctcagaattttcagtgaaaatatcaattattntcaaagggtaagtagaagaagtgatctaagtttgttcttatactagagtaaaatagataataattctgcttgatggagaatgtcgtgaaaaataatggaagtagctgatggttaccatcaaacaggatcttagagtattaatttacagttcgt

SEQ ID NO: 4267 - DNA, 673 bp, Photorhabdus luminescens
  misc_feature (404)..(404): n is a, c, g, or t
tactcgatgtgttacagaaatctggtgctgaagtcatgatgttacgcgctgatgttgctgatgatgcggcattgactaaagcactggcacagatgcgggcaagatttggtgctatcaacggtgtgattcattcagcgggtattgaagccagtggattgctggagcatggcacgtcgcaggactggcggcatgtgatggcagcaaaagtaagtggtacacagcaattgatgacggcgataagtcaggaccctctcgactttgttctgttgtgctcttcacttgcctcattggtaggtggaatgggtcaggcagactacgcggcggcgaaccgttatcttgatgccgtggcgcactattggcgacagcaggctataccggtaacgtcagttaactgggatacctgngcagaagtggggatggccgtggattatgctgcacgccgtcaagaaagcgtgatcggtctcagtaatcaagagggctgcgctattttcgatctggcgatcgctggaatggaagcacagatcgttgtcaataaatttccccttgtcagcgcacacaattacaggatttatcagtgatatctgattccgccagcccagaggaagcggctcgtcaattgtggtatgagctactgcgcgaaaagaccatcacttggaaaatgatttcttcaact

SEQ ID NO: 4268 - DNA, 755 bp, Photorhabdus luminescens
atccagaggtgccttattttgcgcaacaacggagagatcaggcagcagttgataatcaagatttacgtgactcgcttttttgctcaattcctctgttttaagttgaatgcggggccagttttttagcgctgagaataaattgtcagccggaagccaaagctcttctgggggtaagagagggcgcattgggtcaattttacggctctcaaagcgttgttggatgtcttgccaaaaacgttcggcggaatggtttatttcttgactgataagcaaagtgttgtcgggtagataatcaaacaatgaaggcaagggttggttaaaaaacaacggttgccagtattctatcccggccggtaacgtgcctttactgacttgctgataaatatgctcattgtcacgacggacttcaaaacgttcccgccactggctgcgaaacagttcaattgtctctttatcggttgggaattcatgagcaggcagtaggttgatttgtttaacttcagtcagcgtgcgttggctgtcaacatcgaaaatgcgtaagctgtcgatttcatcatcgaaaaaatcaatacgatagggatgctcacttcccatagggaaaagatcaagtagtgcgccacgagtagcgaattcgccgtgttcaagaacttgttcgacactacgatagccaccctgttctaattcagtacggagtttatcccgtgagagtctctgatccttgtgcataacagtgcatgcccgttaaggtactctga

SEQ ID NO: 4269 - DNA, 678 bp, Photorhabdus luminescens
  misc_feature (484)..(484): n is a, c, g, or t
attcacaggcaatgggccggtttgaatatgactcaagaaatgttgtgacatccgattctactcatgagcgcttataaagtaacgaatcacgatgaatgagggttgacgaatatggacagcgatatcttacggacatctctactaatacgagaaacggaagaagcattgttacgtctttattccactggagagctccatggaacagtgcatacatgcattgggcaagagttaacaggcgcaatagtatgcaagtttctgaaaaaaaatgactgggtattctccaatcatagatgtcacggccactttctttcgcggacaggcgatgttacaggactgatcgcagaggtgatgggaaaagagaccggcgtgtgtggaggccgtggaggaagtcaacatctatgcaaagagggattttcttttaacgggataaaaggcgggatcttaccgggagcaaccgtggcagctagtcccaagaagttccccnttgataatcttcatctaatagcctgtatccgaaatggcactctacgacagggtgtctcatttaaagtgttaactatcgcagccaagcgggaactaccgctatttttcctgttgagaaaacaatgattgcgccactttacttttttgtgagacacctattgtcgcactataagctaccgctctctgcgtttattt

SEQ ID NO: 4270 - DNA, 747 bp, Photorhabdus luminescens
actccagcgtacatttgctttgcccagctgtttttgtagggtcaatatgaataattcatgaaggggactctcaagtcgttcaaggatcgtgaagacctctggattacccagccgacagttgatttcaagaaggctcggcattccttttttgtcaatcatgacaccaaaatagaggaatcctatatattcgattccttcagaattaagagctgccagacaaggttctacaatttgggtaatgatagcctcatgctgtgcggaggacagtactggggaataagctcccataccaccagtgttagggcctttatccccatcaagcagctttttataatctcggctttcagccagtggtagatagttttttccgtcaaagaggatggtgtaagagacttcttcaccttcaatgaattcttcaaccagcattggtccgacatttcttgtgaaaaactcttccagcgtgtttttaacatgctggcgatcctgggctatcactacacccgttcccccatgaaccataccgtctgctttgataaccacaggtaaaggtaatgtgtcggcaaatttttgggcctgttcctgtgattcacaaattgcgctgtaaggtgtaggtatttgatattttttcatgaatttttctggaaaggcctttccgacctttcaagtcgggaggcttcacgagtccgggcaatgattggtaacccacgagattaaagtagtcggctaccccactgccaaagtttggga

SEQ ID NO: 4271 - DNA, 666 bp, Photorhabdus luminescens
taatccggccaccgttacgttgcacgatataaactgcacgccttaatgccggttgatcgtcctgacttgggtcaattacaactaaaaggttttgatagtttgccataatggtatcctcacagaggctagacaaaacacgcttcaatactcacgcttcaatactaaagataaaccaatataagcaaaccgaacaggttagaggagaaccagatcaacaaaataaggtgatctggttttaagattaggtaattgaaacagatttttttccgactaactcagacaacttatccatgttttcaatcgtgatgtatttaccttttacaccgagagtttggtttttctggaaacgcccaagcagacgactaataagttcaaccgttaaacccagataattaccaatattcactgcgggtcatggttaaacggaattctttcggtgagaaactccgctgagcgaaacgaccagagagattataaataaacccggttaaccgttcttccgcgtttttcttagatcaccagcgtaatatttccttggtcgcctttaatttctccactcatcaagcgcattatttgctggcagagattaagcattttgcccgacgatcattaagtgttcaaacgggatttccagacctttgatgtttccagagcctgagcaaactt

SEQ ID NO: 4272 - DNA, 764 bp, Photorhabdus luminescens
  misc_feature (593)..(593): n is a, c, g, or t
ctttaacttctttgaattggctttctgcctctttatcgccctgattacgatcaggatgatatttcatcgccagccgcttataggcttttttaatctctttttcgctcgctgttttggaaacccccaaaacctcgtaataatctcttttcgccatctcttattttacccttaacatgcgcgcacgggcgcagagttccctcaacgcccgtgccggttaatcagcaacagttatcatcatctaactgtcaccgcgcccgctaagggctattattttttatctttaacttcttcgaattcagcgtctacaacatcgtcatctttcttcgcactgtcaccagcatctgcggttgcaccagcctgagcctgctgctgagcaatttccaacagcttagcggaagcctgaaccaaagcctgaattttcgcttcgatatccgctttatcttcgcctttagcaactttttccaactcagctacagcgctttcaatcgcggttttatcttctgctggcagcttgtcacccgcttcttccacttgcttacgcgtgccgtgaaccagttgatctgcctggttacgaacttgtaccaactcttcanacttacgatcagattccgcgttcgcttctgcatcacgaaccatccgttgaatttcttcctcattcagaccagcagaagccttgatagtgatctgctggtcgcggcagtattattgtcttactctaccgacgcatgcacaataccggcagcatgcatgtcaaagtcacctca

SEQ ID NO: 4273 - DNA, 685 bp, Photorhabdus luminescens
aaggcattattctccaccgcattcttcccggcttgggccccggtaacggcgctttcggtggagtcaccggcaatgccgccggccagcccggccgccaaagtagaaagagtgctgatggtctgtttttcctcttcacttaagtcgctgactttagcattttcgccgtgaatatgcttcatcagttcccgggcagccagttcaccgcccgccgcgcctgccgcacccgccagcgcattgttgccactgacttcggcggctactgcccccagaatggcatgggccagagtattggtgacgatatcgacttcatgggttttcgggtcggtagtcaggtctttaatcaccccggccagataaggagaagcgccgcctgccagtgcctgaccgatatttccgcccgcgagtccctgaatggccgcggtagccgcctgtaaagcagtgtggtatttcccaccggtgcccagaccagactcattcaatgccgcgttataggcggtcttgtaaatctggtctttaataagcgccggggtgatgtcggttttaccgttatccttcagtacttttatggccgcttctttatccgggtcactgatgttctccagtttggcgttggctgtcttgggggcgataaatgcgcctcttcggtgctggagaatataatcacctgcccactgaattcccaatt

SEQ ID NO: 4274 - DNA, 748 bp, Photorhabdus luminescens
acccgctccggtgccttacaggagcaagttgctaacaaaatgcaggaatggtttgaatccggtttacaacagtgggatatcacccgtgacgccccctatttcggttttgaaattcctgatgcgccgggcaaatatttctatgtctggctggatgcgcctatcggctatatgggttctttccaaaacctatgtgataaacgcggaaatctgaactttgatgagttctgggcaaaagattccaccgctgatctgtatcattttatcggtaaagacattgtttatttccacagcctgttctggccggccatgttggaaggcagcggttatcgtaagccaaccaacgtgtttgttcatggctatgtcaccgtcaacggtgcgaagatgtccaaatcccgtggtacttttattaaagccagcacttatttggatcatctggatgcagactggttgccgtattactatgcagtccaactctcggctcgcattgatgatatcgatctgaatctggaagatttcgccaacgtgtaacagcgatatcgctaataaagttgtgaacctggcctcccgtaatgcccggttcattaataaacgctttaacggcaagcctggcgataaactgggtgatccggcgctttaccaccttttattgatggggcaaaggtgattcgcagaccagttaatacccgcgaattctgtaatcatccgcgaaatcatggtactggctgatttggtaaccgctttgtggtga

SEQ ID NO: 4275 - DNA, 674 bp, Photorhabdus luminescens
  misc_feature (674)..(674): n is a, c, g, or t
agtgaggatcaagaaaaagattatatccggattgcgacccgctctcgcttcggggtgatgcgtgtcgacgataaccgcacagaagagcaaaagcagtatgatgaagcatggcgaaaactttatcagcccagttcccaacactataaaaatccgatcccactggccccgctgctgcccggttcgcctcctgatgatgaagctttacccgctcctcccgcagagggtatgccggggactattccgcagccgttgacaaaaaaactcccgctggtcagtacttctccctggtcttttttacccagctatgaagactgggttatcctcgggcaggaggtggctggcctaacagaacaagggttggattatatccgcgacagtacccgcgaacttcttgctcaatttggagcatggttaaatcaagctgggaagtgggtgtgtgaagagattattgacccgataagccatcaggccagctatgccgtcttcctgggtcagtgcacaaacgggaaaaatcgcgacctggacggagagtgagataaaagcccggtggcagactgtgccacagggttccgacatcaccctggaagagctaaaaacattagctggatgcatattttaaagagggcggcgaaggaatgctggaaatggtagtgattattgtcggcgttccattn

SEQ ID NO: 4276 - DNA, 802 bp, Photorhabdus luminescens
ccttacaggcacggccccggggctcctctagagtccacctgcaggcatgcaagcttatttgtggcatttccgccattttagatcctgagagatcggtacatgcattaactgtcatgcgtgctattgagatatttaaagatctacataacaatagcacactggaatttatcttcagtgaagattatggctcaattgaaggaggtgctaaagcagcacactataatattgagaacaatgtcgatatggtcataggtcatttttcaagtaacgcggcaataggtgcggcggaagtctactcacatcataacattcctgttctgttacctactgcaactgaaactaccttgaccataagaaatagcaatatattcagaatttgcttcaataataaaaatattgcccatgcacttactgtattaacaaaagaagatggagatcactattatgaaataaaaaccgatggctcaaaatatagtgataatctggcagaagatattcgcagaatgttgagcagagacgatgctgcggtaaaacccaatgacaataccgatcaaattatttttattggtactatcggtaaaagtgaaaaatttcttcatcattatttcctctgaaaagaaaaatggaacaattatccttactgatgatgctgcatgcaagcaacttaatttggcagaaaatgtggaaaatggacaaattacccgtatcggatttgctccagtcgaattcattaacccactggaatcctgtatcccacactatatgcaacaataccagcaattgcctaacatcttctttcttg

SEQ ID NO: 4277 - DNA, 665 bp, Photorhabdus luminescens
agcggtaagctcggtaaaggcgtccaaaatgcggacgatttcggtttggatattgagagatgggatgggaatttgtattttgtttaatatagcctgtgtcaggctaggtctccctgcacctgtgtctagcgccaacagatcgatagttttgataaaataatataaaaatttagggatgattttcttagcatcaatttctgtatagtaaattgtgtcaacgttccaaaatggtgactcaatataaaaaatatttgttatcgagcccttacgggggattaaaactgtcggctgattatatgaataagtatcgacataccccattatcccgcctgaaccataaactggaatatcgccagcattcaagttcttccaatctttgccatgttttattttcgccacttgctccaaagattcccatactacctcagccccttgaagcaatttctccataaaactcatattgctcatgctttattctccgttccttcaatctcagcaacaatggcatcaatatccatccgaagctggtcgatttttttaacgggagtctttagttcagcctcgagtttcgtaatatcaattacttcggcggtgtattcagctttcacatagttactcaccgacgggttgtaatcgttagccgcgatgggttcataactgactgt

SEQ ID NO: 4278 - DNA, 751 bp, Photorhabdus luminescens
  misc_feature (597)..(597): n is a, c, g, or t
ctggatgaacggttgatgcatccagcgggttatcaccgtgattaatccgtaagaatccggcacattgttcaaaagcctttggcccaagacgattgactttcagtaattgtgcacggttattgaaacggccattctcatcacgccagttgatgatattctgggcaatcatacgggtcaacccggcaactctggttagcagtggaacagaagcggtattgagatctacgccgacggcgtttacgcaatcctcaacgactgcatccaattttttggcaagctgactctgactgacgtcatgttgatactgaccgacaccgatggatttcggatcgattttcaccaattcggccagtggatcttgcaagcgacgggcgatagagactgctccacggagtgaaacgtccagatcaggaaattcttgtgccgccagctcagaggcagaataaacagatgctcctgcctcactgacaatcactctttgggcttttatctctgggaactgtgtttgacatccgcgaagaaacgttctgtttcacgggaagccgttccgttaccgatggcgaccagtttcacttgatgtttgagacacaatgctgncacgcttgcagcagctttagccgtttgcccggtgtgtggatagatggtgtctgtggcaatcagtttgccggttgcatcgataacagctactttgacaccggtacgtagaccgggatcgagccccattgttgcgcgcatacccgctggcgcggac

SEQ ID NO: 4279 - DNA, 673 bp, Photorhabdus luminescens
  misc_feature (211)..(212): n is a, c, g, or t
  misc_feature (217)..(217): n is a, c, g, or t
  misc_feature (221)..(221): n is a, c, g, or t
  misc_feature (231)..(232): n is a, c, g, or t
attcaacttcgttacgtgtgactatgacggaaattcttgatcgtcacccatcccccggtcgtgatcgcagtgaggatctttattttggtgtgctaagtttccccgtagagagccacattatttactaccgggaagttccgacgggtattgaagtgttggcggtgttgcatcaaacgcaagatccacataatcatctataccctatggattnnaagangcancgcgacggcnngggagcaaatcccgcgggagcatacagaacgatgtgaccggggcgacccagtgccttcaccctatcccaactttgtatatgccggcgccttctttcatactctcaactccgccgtcttttcttaaaccctccacaatcctcttctgcttcgctctttttctccccgcctcatccgcctttttcttttcctttcttccctcacacctctgatctttcattccgcttaactcttgcgtcccctaaccccccctatcgtctgcttttccctaccctcctttctaccacccacgcttccgcttgctcccgtatctcttcccgtccttccgtctcccgactacgctctcgtctttcgtctctctatcgcacctctttctctccgcttccctctttcacccctcccccctcaacttccctaatctttccgtctaccttcgtcttttt

SEQ ID NO: 4280 - DNA, 750 bp, Photorhabdus luminescens
atcaaaatatttataagcatcgccaagggcttttcttgcttgagctttaggtacgccagcatcaatcatctccctataacttgtatgaaattcctctttcctcatatatctctctttttatcttttgtgctgcgctgatttgagcatgaggcatcctagaagttgaatgtaataatgtagcgggcgctgataagtggttttgctggttaaggggagagcatgagatgacaatagccattgaacatttgcaggacattcagttaactcaccttgaagcgctggctttggcccaactggtcaagcggctgaactgggcggagatacgcgcctgtgccgtgaatgacgaggaggcgtatcagattaaggatgccctcggtaagcttcaatctgctctggcttaccgagggtatgcgccacggtaaatcaataagaacatcggaagatctagtgattgtgaactgcttctctaaatctagtcattaaatgttgaatctagcttttgagggcagttcatctataattttattaactattcttcaaaagaataggattgaaaataactaatgtctttttatctttttttataccggacggcataactgcctttttaaatatagaaaatatttccttctaatttgagagccttgattaacagaaaataaatatccgataaatgcttatcatatttaacatgtaattacattccgtcatctacttcattcagaaagttatcggatcctatgtgtccac

SEQ ID NO: 4281 - DNA, 660 bp, Photorhabdus luminescens
  misc_feature (385)..(385): n is a, c, g, or t
  misc_feature (413)..(413): n is a, c, g, or t
tcgttgatagaatgattgttgagcttgataaaacactcagcactcaagttgatgaaattatgcatgccaaagagttccaagagctggaatcatcatggcgttcactgaaattgctggttgatcgtaccgattttcgtgaaaacatcaaaatcaacatcatccatgcgaccaaagaagagttactggaagatttcgaattttcaccagaaatcatccaatcaggcttatacaaacatgtctactcaacaggttatggccagtttggcggcgaaccggttgcggcggtcatcggtaactatgcgtttagcaatagctcacccgatatcaaactgatgcaatatgtcagcgcggttggcgcaatggctcacgcgccattcctctcttncgttgcacctgatttctttggtatcagnagctttaccgaattaccagcgattaaagatctgaaatctgtcttgaaggccctgccacaccaaatggcgtgcgctgcgccaatcggaagatccacgttatctcggtctgcaacaccgcgcttcttgttactataccttactcaccgtcgaaaccccattaataacttgaatatcacgaagatgtccccaaaggatcacgaacctttcctgtggggtcatacctgttaatctgctggcacttgtttgt

SEQ ID NO: 4282 - DNA, 730 bp, Photorhabdus luminescens
tacgataaccttctggcgctggcataccgaaattacggcgaattttttctttggtttcacggcctttttggtgaccaatcaccatcactggacgtccatcaatacgagccagaccacccacaattgctttgtcatcagcataagcacgatcaccagcaagctcttcaaaatcagtaaaaatatgctgaatatagtccaacgtataaggacgacgtgggtgacgagcaagctgagcaatttgccaggcacctaaatctgaaaagattttgcgagtcaattccagacttttttcccgcaaacgttgtacttcttcatccagatttatatctaatttttcaccttgacggctaactgcggttagcgaatcaattttcgcttccagctcggcaatcggctgttcaaattcaagaaaattcagactcataacattcctaattttagtcaaattctaattctacctgctcattacccagcagagttcgcaaatctgtcacaaggttatacgttggcgttaccctgcacgtcgcgccaaatcttaaacgggcgcggccgtcttccctcggtaataaagatgaaccggtatagttccccaacgatgtggttccaatgcctaccaagacggttcacgtttgatcatcatttggcctgtctgacagcgatataccagcccacgcgcatatttgtaacccactgcctaatgagccttaagagacgggctgaattacaaaaa

SEQ ID NO: 4283 - DNA, 671 bp, Photorhabdus luminescens
  misc_feature (167)..(167): n is a, c, g, or t
  misc_feature (269)..(269): n is a, c, g, or t
  misc_feature (282)..(282): n is a, c, g, or t
  misc_feature (288)..(288): n is a, c, g, or t
  misc_feature (435)..(435): n is a, c, g, or t
tggcattcatttaattcattacgttcttctgctgtcaggaaaccaaaatcgaccatttcatctatggaggttgcaccaaaatggcggcgggcaacccatagtaaggtatgaatgtctcgcaatcctccggggctgcttttgatatcaggttccaggttataactggngctgtgatagcgctgatggcgttcgtgttgttcgacaattttggcatcaaagaattcagtggaaggccaaaaaccatcactgaaggtatgtcgctgtaatcnaagaaaaatggangaatcnccacaaattaaccgtgattcgattaaattcgccgcaatagtcagatctgataacccttccagcaaacactcttcaagtgtgcgaccactgtggcccactcccaaaccgatatgccatattcaagtgatcaattcgcccgacattccnaagctttgaggtcgccgtgagctggctgtccactcgaccatccgcctcttttatgctacatatgctgataccattcccccctgacctttcactcctaccgtcttccattgatatccgatcacatcctatcgaattctatacctattctcttaatgcgccgaagcacctaactcattccaccctttatccctaaatccatgcttctccgcatatatcgcctctcttcacctctcttt

SEQ ID NO: 4284 - DNA, 744 bp, Photorhabdus luminescens
  misc_feature (615)..(615): n is a, c, g, or t
tgaataaactggaagataaatcctataacacaacaatgctgcgcgcacttgccagctttattattgaacgtaataactaaggtctgccggtaaatctacctgctggcagcgctattaataaacacttcttaacgagcatcaaatgagcattgatatagccaaataccccacattggcattagcggaaaatcctgaagaacttcgtatgttgccaaaagagagcctgccgaagttatgcgatgaacttcggcaattcctgctaaacagtgtcagtcgctccagtggtcattttgcctccggtcttggtactgttgagctgactgtagcattacattacgtctataaaacgcctttcgataaattggtatgggatgttggccatcaggcttatcctcacaaaatcctgacaggacgtcgagatcgcattgatacgattcgtcaaaaaaatggtcttcatcctttcccgtggcgagatgaaagtgaatatgacaccttatgtgttgggcactcatcgacctctatcagcgctggattaggtatggcaattgctgctcaacgcgaaggcaaaggccgccgtacagtttgtgttatcggtgatggtgcgataacagcggngatggctttcgaagcgatgaaccacgccggggatatcgacccggatatattagtcattcttaatgacaacgaaatgtctatctcggagaacgttggtgcattaaataaccatctagcccaacttctttc

SEQ ID NO: 4285 - DNA, 665 bp, Photorhabdus luminescens
  misc_feature (572)..(572): n is a, c, g, or t
  misc_feature (625)..(625): n is a, c, g, or t
ttgctgatattgcaaatgtcagaagtctctttcccaatgcggctctcggaatgagaaatcatgatgtgagtcttgcattaaaagatgccaattatgaaatgacggatgcttatctacgtgatgttctgaataatcaagcagatctgaatccagataatattcagcgacaacttctgtttcgtattgggcgttcacttgatggtggttatgaaatacccgaggattttgatatttatgcaatattagttaaaaccttggtgaatcgttatggtgtaaattatgccagcattgggttgccgagaaaaataagctactgggaaatttggaacgagcctgatttactgtttttctggaatacggatgatccacaaaagtattatcaattatatgaaaaagtagtgagattaattaagacggttgatcctgatgctaaagtgggtggtgcaggtatttcgtttagtaatcatgcaggagggcattatattgatggatttttccgatattgtcgggataatcatgtaccgttagatttcttttcttggcatggatacgttgatactggagacccgcanaacattattgatatgggtaatacgattcagaaaagtttgcatacttatggctntactaagacagagagtatttgtactgagtggaactctagt

SEQ ID NO: 4286 - DNA, 738 bp, Photorhabdus luminescens
taaaagccactacaaccccacagtttttagggtttggtacattatcaaaagcagaatatgcacgttgcgatggttatttttatcttcataaaagaccgaataaaggtagaaaattcaaaaaatcacgatatcgaatggtgcgaaaatctcaggtcaaagatgggcgttcggcagcaatggagccttggcttatttttattagtatggatgattttaaacctcgtcaggtgatgaaaatttacagccgaagaatgcaaatagagcaaaattttagggatgaaaagagtgaacgttttggatttggtcttagagcaagttatagccacggggctggtcgtttatcagtattgagtctacttgctacactgagttcggttgtactttggctgattggtttttatgccgaaaataaaggaatacatcttaattatcaggcaaatagtattaaatcaagaagagttatctctcatctgacattagcagagaatgtcttacgccattccccgctaatattatttgaaatagtgcttaataaaaccctcaagcatctcgccaaaatctaccaaaatatggttttgatttattacgctgatttgtggggatccttcagcgctatgcaggtggaaatcaagggttataccaagaaaaacacctttccgttacgatatagatgttcaagctaatatacgtaactcaaataaggaaaggtgtttatgggaattaaagcacaaagctcag

SEQ ID NO: 4287 - DNA, 656 bp, Photorhabdus luminescens
  misc_feature (487)..(487): n is a, c, g, or t
  misc_feature (656)..(656): n is a, c, g, or t
atccagcgctggatttgcgcaatatcgccgtggctgtgcccctcaaaccagttgaaccacctaagcaccatccccgtgaatatgatggtagctatttctccgttgtggttagtactactactttccggccggagccgggcagtgatgatattaaccgcgcctatgaagagtgttgggtaggtcaagcaggatatcgtaaagcggatggtaattggcagcgttgggcattggcatttattggcgatactatttctgcaacaggggaaaaagtaccggaagtctatatcgttgatttacctgaacaggatgctgattatgcgatagcaggggaaaaaccgctgcaaggtacggaaacaacgttacctgcgccgcctgccagtgtaatgcagcgtcgtttgacattgaccagccacaaacgctggccgggagtcgtgaataacccgcgtcactggttgcgtgtttcaccgaatggtgaacagattggttntctaatgaaagatgataatggtattgtgcaattgtggacaatatcgccaaatggtggcgagctccgtcaaataactcagagttactgtggcattcaatctgcttttagttgggaaaatagcggtcagtttgttgcttttatttgtgataacagtgtgatgctgtgcgan

SEQ ID NO: 4288 - DNA, 749 bp, Photorhabdus luminescens
  misc_feature (733)..(733): n is a, c, g, or t
taatatatctacaaatagttgagaattcatcttattaccttattttagtgaaggcttctggatacatttctttatttaaattgtgcaaatcttttattgctgaaggaggagcattagtataattgcgcaagtctctaatatcttttgccaataaatctctagccgatcccgtataaggtcctttcattgtaggaatcagtttatgttctcctctagggagagctattgatggagctactttaggatcataaccagtaattacttgccccgcaggatgtttttgagccgtatggtggatatctaatttatcacccaccttagaacgtctctgtaaatcatcgaatgtactaacttcatatttttgtgttggacaagctgccaacccgaacgggtctatccaattgaccggatcatggacatacccgtacgggttaacgccaccactaagattcagaggatcaggcgataagtactggcccgtatcactctcgtaataaccgtgccgattataaaataaaccgctttccctgtcttcatactgaccagcaaaccggaaattacacgtcaggttgcgcgggtcattgacccgtagcaccggccagcattccggctcgccccaggtgagcagtcgtcctgcccatatcagctccccggcttcggtcaggatttcccgtacggtcccttgatgatcactcaccacatagtacagctggccctttttcaaccgggccanaggcgtcagggcaccc

SEQ ID NO: 4289 - DNA, 668 bp, Photorhabdus luminescens
  misc_feature (642)..(642): n is a, c, g, or t
cccctaaccggatcacctccccgctccatctggcttctagctcgttgatggaaagtacttcgggtgaaacggcataaggagactggatcagggcctgatcagtggaaaggcgcgctaatacaataaatcctccctgtttgtcgcgaaaggccagaggcagtagcttgggagtcagtttggggaattttaaacggcataatgccagatcaacatcatgtgccttgccgtactcttttatcgcaggtttcagtttgttatgggagagcagaggctgtggttcctgagcttcacctttagctaattgcaacaataatcgacaacagttaagcgcagatgacaatgtatctgcatcggcggatatattttccctattcattggaattttcccttacgtgattcccgtctcaccgttgtaacataaaaaagcctttcccgcacaaaatgatgtattgcagaatcaattaataataatctgtattaagagcataggctttaattcgaatatatgtcattttcataggggggtgcaagctaaagataataaaatggcagtcattaatcaatattatcctaaaaatgtaattggtcattgctaattggttattgctaattggttgttgctaattctcgttattaatcggngcctggtattcagtatctgaaatatt

SEQ ID NO: 4290 - DNA, 754 bp, Photorhabdus luminescens
  misc_feature (616)..(616): n is a, c, g, or t
  misc_feature (691)..(691): n is a, c, g, or t
  misc_feature (750)..(750): n is a, c, g, or t
aagctttatccatccacaccggctgcgcactttggttttcggtcagcgcccagacaatggcattgagcgggcggtaacggcgcaagcgacgcagggccatcaattgagcggtattcggttccgcttgcaaactgccgccccagagcaacagcgtgcgataaccctcctgccagtgcgtcgtggtcagccccggcgcgatggcttccacctgttccacttcgcccaccaccagtaaaatgcggactttataccaccagaaccgcccgtaacggaggcgcatgcgatcgcccaaatcaccataatcatacggttcgctggctggcaaaagtggccgggtatcggacttcacatcggtgactttgtttttgacaaacaacgttaccgtgataaaacctagcatactcaccaccacagtgagcacccaagctattccacaaacccacaacagatggttgaaagtttcggcatcagtggttcggtgttctccccaaacccaccatcccagaccagccaacgaaaccagcagggtaatggtgcctatcagtaagataagtgtcttcaccaccgaaataggcggtattttattctcttgcagtgccataagattttactattncaaacgctaaagtatggtgaggatcacgggctaccaccccacaggggtgccggtattttccggcgagatcgccgncagtgtttgcactacgatcgcctccatcccgcccatattgccccaattgagatcctgtngatg

SEQ ID NO: 4291 - DNA, 668 bp, Photorhabdus luminescens
ttcagcttcttcagtattgaataaaactttatcctcctctaaggattttaggattttctttctattctgatttaacgaatatctttcctgattaagacttgcgatctcttcatctatctcttcaacaagtacttttgttttctctttgtcttgttgtcgaaaatcaaacgcatcaagaagttcctgtttcttctccgcatctttcttctttaatagcaaaataccttcaactttactgatgtcttcgagtgacccccccaactctttctttaccgctttttcagttgtctgtttctcttccagagctttttcttttttatagtgttcttttataagctctgcattaaatccgagtatatgagagagatagggctcccatgatgcatctttggaacgaaactttctcaattggaaaacatcgctataatcatcccgagatccaataagggatccaagactattgcgataactcccgggttttatcacgctaagatcaagtaaactatctagcagctctttggctttatcaaaagagacatcttcctgatcccattgatctgtaaggcaaagagagtaatctgattttcttcctgatgttccttgaagcatatctttgaaggttgggcaacaatcctacggatagtcaagaaactggaatcctttagttc

SEQ ID NO: 4292 - DNA, 814 bp, Photorhabdus luminescens
  misc_feature (1)..(1): n is a, c, g, or t
  misc_feature (9)..(9): n is a, c, g, or t
  misc_feature (20)..(20): n is a, c, g, or t
nctgtcaancaactgtactntgggcttctctagagtcaccctgcaggcatgcaagcttcaacgttgtattcgctttttaaacgggcaacaaccacatcaaactggagaataccaacggctcccacaatcaaatcgttatttgccagtggacgaaatacctgtacagcaccttcctcagataattgaaccaatcctttcagcagctgtttctgtttcagaggatcacgcaagcgaatacgacggaataattccggcgcaaagttaggaatgccggtaaatttcagatcttccccttgagtaaaggtatcaccaatctgaattgtcccgtggttatgcaaaccgataatatctcccggataggcatgatccacatgagaacgatcacccgccataaatgtcagcgcatcagcaatcaccacatctttcttaattcttacctgatgcagcttcatgcctttttcatattgacctgacaccacacgcaagaaagccacacggtcacggggtttaggatccatattggcctgaatcttaagataaacccggtaaatttatcttcctgagcggagacttcgcgacatctgtctgacgcggcatcggcgcaggtgcccatttaaccaaaccatccaacatgtgatttacgccgaagttactcagtgcagtaccgaaaaataccggtgttagttcaccttgcaaaatgcctgatgatcaaactcatgagaagccccctgcaccatttccagctcctgacgcaattgttcagcccgaatcttcaccaatcgcagcatccagttcaagattattcaagccctta

SEQ ID NO: 4293 - DNA, 680 bp, Photorhabdus luminescens
  misc_feature (356)..(356): n is a, c, g, or t
gttagcatcattgctaagcgaaaaatggcagagaaaaaggttgcggatatcaaaaacagtatcaccgagtacgagggttatgctcgctctgctgcgggtaaaggcgataatgggcttgctttagagtgtgctcagaaagttgcgaccctgcgtgatgaactggaaagagaacaagggttgtttgaatcgttccagaaggctgaaacgacgcaccgacacactgtacaagaggcgaagaagaaggtgtctcagcttgagaaccaggttgatttggttaaggccactgagcaggtgcagaaagcccaagctgcgactcacagttctgtcgttggcgcttcttcaaaaacatctaccgnccttgattcccttgagcgtatcaagtcacgtcaggctgagaaagcggctcagttcgaggctaagcaggagctccacgatagtatgacttttagcgatctggataaaaagcttaaagagggctgcataacgtcaagttctatgtccccagaagatgaacttgctcgtatccttggcaagtaaatactcagttggtaaatcaagatcctgcttttttaaagggggatcttcctatcaagaaatatttctatgctttccaaaatcgcagatgcatttaagagcgcattcgggggtaagacggttgcgcctcgcgctacaaaggtgcc

SEQ ID NO: 4294 - DNA, 742 bp, Photorhabdus luminescens
ttccatctctgttgctaaatcatattcagaatcacgggtcattttcattgaataggcgttcagtgaatcataatcgaaaaagcctttgaaaatttcatcaagacaataacgcataatattgtctagcaggatcattgacttgcggcggtgtggcatttcgggcggcaagttaacaaaacgtggcaccttatctgacggaatttctaatagtgcatattgaatattctggctgtggacaatttcaactgccagataagtgtagtcatcttttagaaattcaaccaggttggtttctggattgatcagaattggtgtaatgtgtggccgcagatgttgacgaaaatattggcgtaaccagatttgttgattgcgtgaaatttgtcgttcattgatgagaaaaaactgattgcgagcaatttctaataacaggtcattatagagcacatcaaattcttgatcggttttagccaccttagcttgaattttttcaatacatttacgggcgctggtggctgatcctcgttcttcattaattaaaattgcgccgtttacatcagcaaaacggactctgtaaaattcatccagattattggagtaaataccaaggaaccgcatccgttctattagtggattgctcttatccgccgcttcttgaagcacacgttcgtggaatgataaccactaagtcctttttggcatagagcctgtcttgggactcggtactcaggtgccgaggcaaaga

SEQ ID NO: 4295 - DNA, 803 bp, Photorhabdus luminescens
cctcaggctacactcttatgctttcggctcgtatgtcgtgtggaattgtgagcggataacaatttcacacaggaaacagctatgaccatgattacgccaagctatttaggtgacactatagaatactcaagcttgcaagtcccgtttgatagcagcctcggctaactcacggcgcagcggttctgacacttcagcccagtgcggaatgcgaatgcggcgcaggtactgagcttggaagcgtaggaatccaccccgcattttcgttgaataggtcgccacaaacagacgagtgaccgcggatagcaggacagcctgcaaggcccgtaaatcccagtcgtctgacgtgacgtagtagaggttgtggtgaggatacagttcaccattttcatagacgatatgcgcctgtcccttgatatctggaatcaggagctttggcctcgcagccaacgacggcgtgatgcggtcaattgtgcgataccagttggccggagctttctgcgcacagtgacgcccagcgatcacctctcgtcgagcctcaaggtagcgccgcagacggtgatactcgtcaagatcgaccagtccgtcctgctcagcaaaggggttgataacacccagaccgcgccactccacttcgccggtcatgatgtctttggttgttaccagcggcaccttccggtctggctcaacattaagcgcgtcgaaatccccgatatatgctttgtccgcgccagtcgcaacaccgatcccgaccttacaccctgcctcttccagcaggggatagtcccccttcagaccgcgaataa

SEQ ID NO: 4296 - DNA, 761 bp, Photorhabdus luminescens
  misc_feature (602)..(602): n is a, c, g, or t
aagcttcatcggtatgggaacggatcacacccgcaaaatagcggaactggtcaatgctggccggtaaatccatatacagggattcatttaatggtttgccagtatccagtgattcaaggatggcaaaacgtttttgttctgcttctagtaagtcagcaattttcagcaaagctgattgtctttcgattgcggaggtttgactccaggcgtggaaggctttttttgcagcgctgacagcaagatcaacatcttcagcattaccggatgcatattcagccaggagttctcctgtcgccgggttataacttttggtcgttgctttggatacactatctacccattgcccaccaataagcattttgtaggattcaacgggcaacatctctttctcaatatcgtgtaatcgtttcattaacatactccgagtactttggtttaagaatagttacatcgagaatctatctcacttaggttattttattttccattcttgttagtaaagagcggatgattccctgcatatatacccgttatccttcaagttgcctcctttgttggctgcactcgctcaccccggtcacatagctatctatgctcccggngattcactcccttgccgtcgcgaccatcttgaaatccatagggtatagactgatttttgtaccttgcctgcactcgttcacccaggttacatagtttcgctatgttccccggggatttcgctcccttgccgtcgcgatccatcttgaaattcataaagt

SEQ ID NO: 4297 - DNA, 671 bp, Photorhabdus luminescens
  misc_feature (437)..(437): n is a, c, g, or t
catggtccgatgttcagcttgaagatcctttgggtatggaagtaggttatcgtctgattccgatggttgattttcgccagaatggtgaattactggggaggatcagcggcattcgtaagaaatttgctcaggagatgggatatttaccgccggttgttcatatccgggataaccttgaactggccccagcgggctaccgtattctgatgaaaggggtagaaattggtcgtggtgaagcgcatccggggcgctggctggcgattaaccccggtggtgccgtgggggaattgccgggtgatatcaccaaagatcctgcttttggcctgtctgcggtttggattgatgatagcctcagagagcaagctcaggttcaagggtacacggtggttgccgccagtacggtggttgcgacccatatgaatcacctgttgacgcantatgcgaatgagttatttggtcgtcacgaagctcaacaactgtttgagcgggtcagtccagagatgcctaaatgaccgaggactttattcctgatgttgctaatctgacaaccttgcataaagtgctgccaaatctgttgtccgaacaagtgccgattcgagacatgcggacaattattgaaaccttggctgaacatgcacctggacaaactgatccttatgaattgacatctt

SEQ ID NO: 4298 - DNA, 751 bp, Photorhabdus luminescens
aagcttcatagctgattgaatatggtgaaatatgcgcactccctctaaacaggaagacttagtaaaagctttcaaagcgttattgaaagaagaaaaatttagctctcaaggtgaaattgttactgctttactggaagaaggttttgagaacattaaccaatccaaagtctctagaatgctgactaaatttggtgctgttcgcacccgtaatgctaaaatggagatggtttactgcctgcctgctgagcttggtgttcctactgccactagcccactaaaaaatctagtattagacgttgattacaaccatcctatagttgtgattcgcacaagccctggtgctgctcaacttattgctcgtctgctagattctcttggtaaatcagaaggtatactcggcagtatcgcaggtgatgacaccattttcgttacactcaccagagattccacaacagaacagctgcgtggagccatccttgggttgttcgaacaagagctttaaatgaacgcgccaacatggcgcgattcattttcccgcagctattctcaggattgataagcttttttattcaacttagagagtaatttttcatgaatatcaccaaatcctccattactcataaccagaatatgatccccctgctgtgctttatcaacaatcatatgcaccagtgaatctatatcagcgctccattacgcaggctgaacacagtgatctgcaatttctgatacgtgccctctaatatttagt

SEQ ID NO: 4299 - DNA, 799 bp, Photorhabdus luminescens
ccgttaggtaatacttcttgctctcggctggtatgacgtgcgccattgtgagcggataacaatttcacacatgaaacagctatgaccatgattacgccaagctatttaggtgacactatagaatactcaagctttgatgtgttagggaagaaagcggctcgggttggggatgctgtatcctgtccaaaatatggtggtaatcaaaccattgtggaagggacgcctagaataatcagctctaatggacaaatatgcactggagggaatgaaaacctcttgtggcgcgacattgattgcttcgcaaaacctatttcaagcataggatggcggtaaaaggccatatctgcctgaaatagggttagttgattcaagtacgggtgctccgtgcttcattatctttttacaaactacccggttgacgtggtggattacggcctgatctatttgttgtcgcactgcgaatatcccgaccaataacatccatactcgcttgaaatggtgggaatggcagagtaatgccgtgttcgcggaatccttgcataataagctggtggacttcgtgacgaacaggcatgctatgccccatttccgcggcataaatacgtaattcaaatatctgaataccatgttgaagatcaaccagataggcttaacgttgccgggttatcaatgatatgactgctgcgtttacccgcggttaacaggatttgggttacctcttgacagctagctcctgcccgtgcatggattgtcactaccacaccattgatggtgtcaaataatgaccagcgaatcaact

SEQ ID NO: 4300 - DNA, 750 bp, Photorhabdus luminescens
aagcttaaccgtttttgtatcattggcagcaataagtagttcaatattttggagtcgctttcggctttgcaagaaatggaaattaagaaaatatctcgatggtgtgtcgatatgtacatttgttgcgagtacatattgaaaccccatcgatgctattatgaaattttaccgcaaaaatatggcacattaccctttttctgttttcagaataaaaaaataaagccggttacccggctttatttccttatctattccgttgcttgatagaataggtttatggaatgactataacactaggatctgttaacgaacattcgatgtttgatactagggtgacagcaataatatttactgtcgagtttcttgatttatcaaacaaagaaacctttatcacctcagtagagagtttttccccttccactccatcatttaacgtaattatcctaccattgtgtttcagaggaaattcatttaacagaatgctagcactctttgaaatatcaacattatcagacttaataatacctttttgttcagctttctgtattacttgctgaacattccaaccgttaatatctgcacaatcatcagatcttgttcccgccacagcgttagcagtaaaaagcatcgcagttaatatcaatatttaggcttttcatttcgacaaccaaatccatatcgtgcgagagcaatatctcacgtcgtatatctctattaagaattatacaaccttctgatgaatgttcacga

SEQ ID NO: 4301 - DNA, 661 bp, Photorhabdus luminescens
ctgattcgcctagccaggcaagtattctggtcgaaagttgcgagaaaaaaattaaagaagccatcggttttttccatttactgtcttctatgcgtgcggaatcctttaaggtgtttcgtgcatatactgaaggcgcaagtgcgatccaatcaagaaactacaagcgtattgaatcactatgcagacaaccggatgaggatcggttgaactctattgcttacggctctgtccctgaagttcaagaaaaactgttggtgcggccaaataacttagaccttgcattgagtcaagcgcaacagagtggtcgtttcaatagcaacgactttggtgaggtcaaacaagccatgaaaagttttgctacgacgctgaaacgttggaagcaaacccattatggtcttgcgatgaagatgttgggtgagggctcgggtactggttacacggaaggcactccttatttggcttttgtcaaagacatccctgtttttgacaccccccttgatgagtagattactaagatgaatagtccacataaaaccaagattgctattattggtgcacgtccagttggcctgattctatcagctcgactggccttattccgtattacgagcatcctgatggataaagccccttatctgcttggaaaggtttaaggcctgcc

SEQ ID NO: 4302 - DNA, 735 bp, Photorhabdus luminescens
aagcttgaggagataatattgagcgggttgttggctgccatattttgaattcatttcattatgtattcgttcaatatttcgttgattaatagactgattaatttcttcatcagttaagttataatagatttttagatattctaacgttgccattaaagagggctgaatatcgtcaaagttttttttatagagtcttttaatttcctcttcgtcatctgtaattttatccgttaggatattaaatagttctggagagatggaaatattaatccccaatagggaagtttggtatttcagtttagcgatggttgtttctggggaagtattgaattgctcaaataccggagcctgtaactgaataaccttacgtacattttcgtaagcatcgtgatatggcagagagcccgaagagtgaaaggttgatagcgctttcatcacatgagtatggccttgctgtccggcctgcgtctgaatcccttccagcaacactttattggacagagaaagtgtagaaatttcatcatccatattttgctgactgagtatcagtgattttagatccgggcggcgtttatccagatgataaatggagctttctgcgtgtaaatcccgtgcctgacggttaagttcagtcagataagcagcgggagagaacatggaaggcactgcgtcgggggcgacatactggctggcacggccaccaaatttactggtataaccttcgtgatccgcatg

SEQ ID NO: 4303 - DNA, 646 bp, Photorhabdus luminescens
  misc_feature (556)..(556): n is a, c, g, or t
  misc_feature (581)..(581): n is a, c, g, or t
cccagaattagcatcccttgctgaacaagagatcatttctcaacctgagaaatatattaaacaagcgtcagcagagctggatctaagtgctctgacgctgatgctaaattttccgcaagctgccatgcaatcgcaaatcaggggcgatatctctcctgagcagtgggatgatggtttgccgatgtttttcaccaattatcatttaacaggaatgcaatcttggaataaaaatcaaagtgaacagaatcaatatctgaatttacgtagtggctttaatttaggtccgtggcgaattcgtcataatagttactacaaccatacgggtacaacatctgaatggcaatcgcttaaagcctatgctgaacgggatattcgcccattaagatctcgtctggtattgggtgaaacatccaccgatagcatggtattcgatagtttcacttttaatggcattaaattgatgtcggatagccaaatgttgccagatagccagcaagggtttgcgcctgttgtccgcggtattgctatgactcacgcaagagtagaagtgcaccanaaagataatattatttatcagactnttgttccaccaggcgcgtttgaaatactgatattaccccagtaccctgaatgggatctgaaatat

SEQ ID NO: 4304 - DNA, 746 bp, Photorhabdus luminescens
  misc_feature (746)..(746): n is a, c, g, or t
gagaaaaaggtattaaatatataaattaattttatacccgtcatctttcaagttgcctctttgttggctgcactcgctcaccccggtcacatcgttatctatgctcccggggattctctcccttgccgtcgcgatccatcttgaaatccagagggtatatatttaaatcgacttcgccaataaatataaataatagcaacgccagttattatgctggcgttggctattttatgagtgattattgataatcactgacaggtgcacaagagcaatgcagattacgatcaccgtaaacatcatcaaggcgtttaaccgcaggccaatatttattggctttggtttccaaggttgggaaaaccgcagtttcacggctgtaactatggctccagtcagaaaccagttcagcttgtacgtgaggcgcgttaaccaatgggttatcttctaatgaccactcaccttttgccactttgccaatttcagcacggatcgccagcatggcatccacaaagcgatcaatttccactttgctttctgattccgtgggttccaccatcagcgtgccggcaaccgggaatgacatggttggcgcatggaagccatagtcaatcaagcgcttggcaatatccatctcactgataccaaactcttctttcaacggtcgaatatccagaatacattcatgttgccacatacccgtatgacccgtatacaacacgtcataatcattctttaagcgagcagcatan

SEQ ID NO: 4305 - DNA, 667 bp, Photorhabdus luminescens
ataccattgtggttccgacaaaccgtccaatgatccgtaatgatttgccagatctggtttacatgaccgaagctgaaaaaattgaagctatcattgaagatatccgcgaacgtaccggtaaagggcagccggtattggtggggactatttctattgaaaaatctgaactggtttcccgtgaactgactaacgcgggtatcgagcacaacgtacttaacgccaaatttcatgcaatggaagcggacattattgctcaggcaggtcaagcgagcgcggtaaccattgcgactaacatggcgggtcgtggtacagatattgtgctaggcggtagttggcaggcagaaattgctaagctgaccgagccaacagaagctcagattgaagagattaaagctgcatggcaggaacgtcatgatagggttctggcggcgggtggtttgcatattatcggtacggagcgtcatgaatctcgtcgtattgataatcagttacgcgggcgttccgggcgtcaaggggatgcgggatcatcccgtttctatttatcaatggaagactcactgatgcgtatttttgcctctgatcgtgtcactagcatgatgcgtaaactgggtatgaaaccgggtgaggcgattgaacatccgtgggtaaccaaggcattgccatgctc

SEQ ID NO: 4306 - DNA, 733 bp, Photorhabdus luminescens
  misc_feature (733)..(733): n is a, c, g, or t
ccaagcacaattcctgtgaataaggatatgttttttattgtttttttcatcatgatttctccagtaataacgcgttttttcagattgatactacaaattgggcaatacccgatattatttcttctgtaaatgggattttagttttaaatttaatggaacaaagacgtacgcgaatggtattcggccagatcctatggttgtattcaatagtcagagcttcctgtttatgacttgttctaccaagaggaatgagtagtggtcaagcatattcacatgtttataactgtaactaaacggctataacttggcttcgtcccatgaattttttgtaaatactcaattgacagaactctgatcaacttctacctttatttttaactacggttaaaaagggggaaagaatatggctactcttgaacagattttagaagatctaaacgaacttgatttcatacaagcacaagacaatgttgaagttatgaggaatgaggaaggctgtttcgttcatgttcgaatgatcgcttatgatgatttggtctaattataaataggggggatttgattcgacagtatcccctctttttttcaaagggggtatagtgtgatacacctcattggtattaacgaggtttacagaaatctagctgttcttagtgcattaaaatcaaaaacggctcccaaaacgtctgaagaattggagcttggttttcatattttttaagggctatcaccn

SEQ ID NO: 4307 - DNA, 651 bp, Photorhabdus luminescens
  misc_feature (447)..(447): n is a, c, g, or t
  misc_feature (524)..(524): n is a, c, g, or t
  misc_feature (548)..(548): n is a, c, g, or t
cagtgtagcgtccggccacgaagagttagtcaaggcaatttcagattatgaacaacaaatgcgcgcatatgctaatgagatcgttggaatttcactgcgcagcgctcagaacgctgtaatacatttttcaataccaccattgaaacaacggcatttgagcataagaagaaataaatctcaaagtcatcaacaccgacgttaatattccgagtaaattgtcataccggaacgaattccatatcattactctagatacacttatacccaatagatttcaagatggatcgcgacggcaagggagcgaatccccgggagcatagataacgatgtgaccggggtgagggagtgcagccaacaaagaggcaacttgaaagatgacggatatattataaacgccaccagtagatatatcatactggtggcttggcttaattaattatgcaattnttacccaaggataagcatcagatgttcctgcaccatctggctcggtgcctctattccaccatttagcttcccaattntgattgttccactcactctatcgncggccttatatgccctatttgcatcccagacagggtaatcacttcctgtatcgggatgaatgggatccaaccggtcaacattacacccttgagtagaatgggt

SEQ ID NO: 4308 - DNA, 739 bp, Photorhabdus luminescens
  misc_feature (739)..(739): n is a, c, g, or t
tgcaatctgctttgatgttcaaccgttctgtacgggaaaacgtaacctatggttctgctgtcagtagcgctgaagaagtctctcatgcgctgacaatggcgcaagctatgatgttggtggaagggttgcctcaggggctggatactttggtcggagagcgtggagcatcaatttccaccggtgaacggcagcgtctgagtgttgcgcgcgctttgcttaagaaatctccattacttatttttgatgaagcaacatcctcggtagatacaatttccgaaactcgtatcctcaattatttgctcgataaaatgccagaacgtacggtgatagttgtaacccaccgtgttgcgacattgagtcgctttgatctgattgtggtcatggaacaagggcagattgttgatataggaacaccgagtgaattggaggcacgcaatggcctttttcagcgtttactgcatcgtgaagaccaatctgtgccggaactaatatcaatggatcctaagaatgagtgaaatgatattgatgtcacctattttgctaaaaggagtcactttggactggtctgctcaccggcgctggagttgggaattctttgcagggatgcaggaacagaagctagcactgagtaatgcaaatggcgagttcgaggttgaaggtcctgtgtgtgaatatattcaggctttgaaaagcggggaagggcgattggctaacttgtatgcttccgggtggcgattcn

SEQ ID NO: 4309 - DNA, 665 bp, Photorhabdus luminescens
ttggcttcattattcttgcactacccgttttcctgctggaaagggttatcggtgatgcatggggaatacgattatggagcctgctggcagtcagttttctaggatggggatttgttctgacgattagaagccaaaacggttgggtacgagtcatacaactgatattgttaattctgatgctgatagctactcgcccattgcaggattggttttggggtacaacggtcacacaacagtcgcaacacagcctaaatttccgccagataaataactggcaggaattagaacagataatgacacaaaacagccataaaaccgttatgcttgatttctatgctgactggtgtaccgcttgcaaagaatttgaaaaatatactttcagcgatccacaagttcagtcacaactgggtgataccttactgttacaggccaatgtcacgaacaacagcccgcagcagaagcagcttttagaaaaacttagcgttcggggattgccgactattttgttttttgattctcaggggaaagagatccccgattcacgggtaaatggctttatggatgccacccgctttaatgaacatttgcaacatctgccaaaatgactcagaaagagaacaccatgcaccgagaacaagttcttagtcatgccttaaacttactgg

SEQ ID NO: 4310 - DNA, 753 bp, Photorhabdus luminescens
  misc_feature (688)..(688): n is a, c, g, or t
  misc_feature (718)..(718): n is a, c, g, or t
aagcttaattgtgactttatgtttatttagcattgtgattggtgaggtaacgatattcctaattctgcaatctgtaatctttagcggtataggtaaattcagtagtgatggttatctaaaaggtcagagaagagggggagagtggttagcgtaggttcggggatatttggtaatatattattgatgctcagtagagttttagtagttttctttaactatagccgtaaaacgaatttaaacttgttgtgaatagaatcacactcatttaagcgtcagaatcaattttttgatattaagtggatttacggcagttagcaatgaaccggcagagacgcctacgcataggagtattagttttatagaaatgggttcatctaccagcaaataagcaaagatgactgcccagatagcataggtgatgtttaaactcatcgcacggataggttgaagcatgcagattgctttgtagtagaagaggtacgatagtgtggcgaccagagaggtgaaaaataataaggagtataattctatatttgaaaaaatatgtgtaactccaggaaaggagtgaatgaataatatgatcatgattaaatagcccacagaggatgataattgcctgatgaaataagccatatcagcaggtatatcttttgtcatgccgtaagagctgataacaacttcggaactncagcctagtgcgcatattaaagcaaagaanaagcctatccagccagatgttgtctgagttgatgc

SEQ ID NO: 4311 - DNA, 670 bp, Photorhabdus luminescens
  misc_feature (657)..(657): n is a, c, g, or t
atcattgcgccaaaaccaaattgttgcttacaagcaatttcatgcccaggatgatctttcaaagcaggataaaaaagttttttcactaacggttgctgttgaagataattgacgagttccaatgcattcttttgctgtaacaggacccgtggcgataaagtgcgcatgccacgcaacagcaggtagctatcaaacgccgcaccggttacaccaatattattcgcccaccaagcgagctccgttgcaacctcttcatcctttgcaataatagctccggcaatcacatcagaatgtccattaagatatttagtacaggaatgcacaaccagatctgcccccaacgccaaaggcttctgtagtacaggactcaggaaagtgttatcaacaatgactgtcgcacctacctcatgggaaagctggcatatatgagcaatatcgacaatacgcaataaaggattactgggtgtttcaatcaataccaactttggttttttggacaagacttgctttaatgcctgttcattactctgatcgacaaaggccacttcataagcaccgcgtttagtctggctgtcaaataaacggtaactgccaccataacagtcatgaggcgcaaccaacagatcggcaggtttgaaggaaaaccatgcttaacangtgaatagctgac

SEQ ID NO: 4312 - DNA, 762 bp, Photorhabdus luminescens
aagcttgctgtgttaccgtctgatttttttgactgttactggtatgttcaatacctattccggcacgatactgtttgtctccctttggttggaagtggctttgtggctccagagaggtgctttgtttatcaacctgtttctgttcgccataagagagcaccttgatattaccggacgtgttcaggctaagcgcaccggtactttgcacccgactgccaatgatattgatatcttcatcaccgagtaatttaagatccgcctcagaaaccaactcgctgccgtgagatttctgttgctggctattatttctttttgaaccgctagtgatattgagtaccgtgcccgttcgctcatcaactttgcgattgatatgactgaccgcattatcgatggttaattcgccactattagcatttacaaaagcaccttggaccgccttcactttgctgccggtaatggcaataccctcattgcctgacagcaataaacgcccattggctgttaattcagatgcatggttggtttctttcaactcacctgtgtctttattctcaccgccgccgatccctccccagtattttttatcatcacgtacagcccggctatcagccgttttctgaacatcgatttgcagttgtttaccggcttccagtgtcagattttgacctgcatggacttttgccccaagatttcagcacgagttcctgccttaatattaagattagtttctgcttgtattcactggaatcaaacgctcggtct

SEQ ID NO: 4313 - DNA, 682 bp, Photorhabdus luminescens
  misc_feature (610)..(610): n is a, c, g, or t
tcgttgatagaatgattgttgagcttgataaaacactcagcactcaagttgatgaaattatgcatgccaaagagttccaagagctggaatcatcatggcgttcactgaaattgctggttgatcgtaccgattttcgtgaaaacatcaaaatcaacatcatccatgcgaccaaagaagagttactggaagatttcgaattttcaccagaaatcatccaatcaggcttatacaaacatgtctactcaacaggttatggccagtttggcggcgaaccggttgcggcggtcatcggtaactatgcgtttagcaatagctcacccgatatcaaactgatgcaatatgtcagcgcggttggcgcaatggctcacgcgccattcctctcttccgttgcacctgatttctttggtatcagtagctttaccgaattaccagcgattaaagatctgaaatctgtcttcgaaggcccggcacacaccaaatggcgtgcgctgcgcgaatcggaagattcacgttatctcggtctgacaacaccgcgcttcttgttacgtctacctttactcaccgtcgaaaacccaattaaaaactttaactatcaggaagatgtcagcanagatcacgaacatttcctgtggggtaataccgcttatctgctggcaacttgtttgactgacagcttcgccaa

SEQ ID NO: 4314 - DNA, 772 bp, Photorhabdus luminescens
  misc_feature (508)..(508): n is a, c, g, or t
  misc_feature (727)..(727): n is a, c, g, or t
aacgggctttttcattcccataatcacatttcacaaacatattattgtgcccatattcaagtcacgtaatgtcgttacctcacgctagttattgacattatttagccaatttggcgtgacgttttttataacagacgttcagcctgtctattgaacattgtcagtgaacagctcataattaattaaaaaatgtgatgataaataaaataaatcattaacaattgtgattaaattttaatgaaagcaccgaagttacgaatattcaatgctggattcgactaatcatctcccggggattctctcccttgccgtcgcgatccatcttgaaatccatagggtataaacattttgcaggtgcgagccattccctaacaaatgactcaatcgggagtaaaatcagaagaaataaacgcaactttggctaatatgagatcgtcattgaagccatttttctatctgcttcaatttattatttctcaattagctgcctatgaacgaaaactctctntcgctatctgataacgctgttcttcctgtgccctcattttcttttttacgcgccataaaatacttaccataataaaccataaaggcgtgccacagagtgcgatcagggtatccggatcaaaaaccattaccactatgggaaagatgaaaaaaatcagggtcagccaagtcattaacacccctaaaggcatcttaaatattgaaccgttatgcacatcanggattattcttacgataaaccaaataggcaatcaaaatcacacac

SEQ ID NO: 4315 - DNA, 688 bp, Photorhabdus luminescens
tggagcaaacgccggagacaccgatacgggccttgaatatcctacccgaaacggaacgcacgctgttactggaaacctggaacgccacggaaaccgtctatcctgatgcgctatgtattcatcaattgtttgagcagcaagtggagagaaccccagaggcgacggcgttgatagcgggcgataaaaccctaagttatatggaactgaatacgtgtgctaaccggttggcttatcagctaatcgaacaggggattcgtccggatgaccatgttgcgctcctgttagaacgatcgatagaactggtggtggcccaattggctattctcaaagctggcgctgtttacgtgccggttgatcccagtatgccggatgagcggaaacattggctgataagtgattgttccgctcggttgctggtcactgatacacgggctgatattccggctaacttgactattccgctgttgcgtctctcggataagaaaagtgcgaacagagagcaagatcatgtaaaccctaatttgccgcgttccagcgccgaattagcgtatatcatggtcaccttccggctctacccggcaaaccccaaggggttttggtacaacatcgtccgatggtcccgctggtcataattattggctatgcacaacatcgaccggaagatcgggttgctttaccgctattccgt

SEQ ID NO: 4316 - DNA, 769 bp, Photorhabdus luminescens
  misc_feature (405)..(405): n is a, c, g, or t
  misc_feature (452)..(452): n is a, c, g, or t
taaaccgcatcacatcagagaaaatgggtatgacaccgtaagcgcccgccggaactctggccgccatatcttccagtaagctataagtatcaacgccaagacgctccgccaacagcttttcttccgcgcaaaatgcatccctaaaccaacgcatggttaagccagtaaagaaactaatcgactccgcctgaaccatgccgggaataacatgaggatttatccgtgtattcatatttgggtcagtgaccggttcaggcagattaacaacctgctgccaaaatgtgccaccaataacggcggtctgggcaggtttgaccacacctaaaccaagacagccgagctgtacatcaccaccgcccataatgaccggtgtgccaatattcagtccacattgaacagcggctntctccgtgacgtaacctaacaaggttcccgtctcttttaccggcganagaatatcagaacgcaatcctgccatttccagtagatcgggacgccaatcacggcttaccagatccagcatgcctgtcgtaccggcattggaaggatcgactgccaactcaccactgagcatatttgccagccagtcgctgatcatggttaaggccgtcgcctgatgatagatatccgggcgatgatgagctaaccataacagacgaggctttgcaccaacgctaatgtttgccctgaacaccgtacacatcatatttaaaagtgctgtcatacaacgccttcaattcactcacttcttggctggaacgcgcatcca

SEQ ID NO: 4317 - DNA, 678 bp, Photorhabdus luminescens
aacaacttgatgccctgatgcgtgaactgaaaaaggcgggcgattctattggtgcgaaagtgaccgtggtcgcggaaaatgttcctgctggtttgggagaaccggttttcgaccgccttgatgctgatattgctcatgcgctgatgagtattaacgcagtaaaaggtgttgaaattggtgatggtttcggtgttatcaatttacgcggcagcgaaaacagagatgaaataactgctcggggattcaccagtaatcatgcgggaggaattctggggggtattagcagtagccagccaattgttgctcatattgcgttgaagccaacttctagcattatggtgcccggcaaaacgattaaccgtcaaggtgaagaagtggaaatgggcactcgtggtcgacatgatccctgtgttggtatccgtgctgtaccgattgcagaagctatgatggcgattgtgctgatggatcacctattacgccagcgggcgcattgtgctgatgtccaatccagcctttctcgctggtgaatttgagaatgaatctagccttgataatccagagactgaaatgggtagctaatgtcgataagcggcttctttgatgggatgaaattggactggtttttgtcttacgtgcgaagttaccttctgcttttctggtgcagtaaggctggtttat

SEQ ID NO: 4318 - DNA, 762 bp, Photorhabdus luminescens
caagcttttgtgtaaccgccaatgtatcgctattaccaaccacatttgtaagctggacaacacctttttgtgttaatgaagcactgggaatatctgttgtcattttttgctctagcgctttatttaattgagcggtgagtttggctatgtttccatcatccagaacatcattgccagatcgtgtcgcgataaaatcagtcacggcagatgataccgctgacgcttgacgtaataccttatttaataagtgggtgggaacattatctggtgaaaatccagtttgtaaactctgatttacctcgtatttgtcttgactgattacattcgcattatcactagtagaaaaagccttaaaatcattcttataactcatatactttctcctgcaattaaataatattattttacaaccaatatattgaattattgtaaaaacaatctctcttgcaattcacgccaatcaagtctagttcagaaaaagaataatgcagcgttcttattacttataagggttaattatttttatataattggtagtaatacatagttcacattagaaacgaccagccggaatttatctattaatacccattacgtatcactattgaccatttatttaaatacccagatatacgtgtgactgcccacccattaatttccctgtcttttctcttttttctgcaagatggtttgactggatttactatgttgacgcttgacggggactttttcttggattacctgtttttcgcaacaaaatac

SEQ ID NO: 4319 - DNA, 677 bp, Photorhabdus luminescens
aataacgaaaccaatgccattccagccagccagttgcggttcaaaacagagcttttccaacagatcgagagaaatttccagacgatctgcttcttcggcatcaatattgataccaacatcatattggcgtgcttgtaatgtcagggaaagcaggcgtggatatagctcattcatgacgcgttcatattgagcacggctataacgcgggtgcagggcagaaagcttaatggaaattccgggcccttcataaatgccgcggccgttggatgctttcccgatagcatgaattgcttgttggtaggaaaccatataattctgagcatcttcctcagttaaagcggcttcacctagcatgtcgtaggagtaacggaaccctttttctttcagcttacgtgcacttgccagcgcttgagcgatggtttcttcggccacaaactgttcatccatcatgcgcattgtctttttaccgccttacgccctaatgggtcgccactcttactgataaggcgatccagtgaatctggaaagttgagctctcgttattggttagaaaccaagttggcccggaaacagcagtccccaggttgctgcattgacaacatggatgactttcgcgccaatgggaatgcccttgcccgctcctgtttggccgggatcaccgcgttcgagtggttttt

SEQ ID NO: 4320 - DNA, 748 bp, Photorhabdus luminescens
  misc_feature (234)..(234): n is a, c, g, or t
taggacaatctgaacgctcaacaacatcagaccaagggagtgatgcattaatgccatacttttccacagtcagaacatcactatcgggataaatatcgctgaatgtattattcacaaacttattattagcgatactattacaatcagagccctgtatcagcaccaatagattcttaccacctctttgcttaagatagtaagttatttcactaccatcatgacggaaaaactgtntatgtgcatttgtatttgagtaagcaaaacctatataacatgaaaaaagcagagcaaatgtcaaaattctctgtcgtaaattaaaataatatgctttcattaatctctcctttaattgacatatacaaagaccacaaattgacgatattgttcctgtcagaaaaaattttaaaatttaaaaacaaggttcagagttttttatccaaagtgctaactaaaacacccatacctttggagagaagaaatgcaaaccactttatccacagaaattacattacccgataattatcatacccacgattttttccgctcttcatcaaagggataaacaaaatatcgctgatattgtggaacagaataaaggtcaaaaagggatgatgtgggatgacaaacccgcggaattaaccatagcgattaatgcaaataccgcacatatacaacttaagattgatggtgacacaacacgccccgatgagcgcttatctacttgagcatgacatatgccatcgcctct

SEQ ID NO: 4321 - DNA, 659 bp, Photorhabdus luminescens
  misc_feature (114)..(114): n is a, c, g, or t
  misc_feature (116)..(116): n is a, c, g, or t
  misc_feature (147)..(147): n is a, c, g, or t
  misc_feature (225)..(225): n is a, c, g, or t
taaagaacgtgtttattccattcttcacaacacgccagcaaggtatggggttgggaatgacgttaacagaaacattaattcataaacttggtggcgatattaatgctgaaaatngngaaacaggaggagcgcgttttattatttggntaccaactaataaaggtaaggagaaataatggcgacagtaatttatcttattgatgatgatgaagcaatccgtgactnattatctatgttattagaaacaatgaattggcaggtaagttcatttcctggtgcgcaagaatttcttgatagaattgatagcgagaatattgcagtgcttcaggggtgtatcctattggatattcgtatgccgggaaaacctgtattggcattgtatgcttatcttttaaaacttattagtccattactcggttattatcatgacccgacactgaaatatcgttatttgtggagccgcttctaaaaaccgagcttctcatttcctaccaaccttattgcgcagattatcaatcgaaacagatacgggtgcatattatccgatcataaatgttgatggcttctcatattctgactccctgataccgcatcgactgtcctctttaatccccaacggcattcattataatgttttttcacgttaactccgcgtcttt

SEQ ID NO: 4322 - DNA, 744 bp, Photorhabdus luminescens
aagcttcacgtactcagggggagattaaaatattcaggctatcctgcaacaggatagccctttgattatttatctgcgcttttcttagcccgtttggctttgaatttagcgacaattttctgagttttggtagaaagcgtcttaccctttttcttatcccctttaggcttatccgcagatcgctctttacgaacagcaccatcaggctcaaaatgagcttctttgcgataaccacgcccttttttcttactgctttcgcggccaagttctacttttctctctctatcgcgcactgttttacctacattccgggctttgcgggcggtagaaagcagcttaaagtcaatattacgctcatccatatgaaccgcttccacacgaatttcaacttcatcccctaaccggaaagttttacccgagtattcacccactaaacgctgaccgatattatcgaaatgataataatcattactcaacgtggaaacatgtaccagaccgtcaataaacagctcattcaagcgaacaaagaaacccaaacctgtcacactcgtgatgatcccagtaaaagtattgcccacttgatcctgcataaaatcacacttaagccaatcagcaacgtctctcgtcgcttcatctgcgcggcgctctgtcatggagcagtgttgggcccattgccacatctgttccatatcactgtgccataccccggtcggtgttccacatgcttaacaatgccttgctgga

SEQ ID NO: 4323 - DNA, 657 bp, Photorhabdus luminescens
ccagccgatattgggtcaacggaatgccctctttgtctttctgaaaacggccgtaactttcgaaaatatgaaatggcgtgccgttctccgcttcaaaatccgtggcgttatgctgtaaagcgtaattggggttgtgataatttctgtctttttggtcggtagattccgggcgcatgtaggagccaagagaccatttgtagataacattttcttctacagcgctggtgacgtccgggttataaatcaacgtatccggcgctctcatgttcaggtagctatcactcagatagagcccgtcatcggcgaaccagaagaaaatcccctcctcagccgccaggcgggtaaagaaatcgtaggatgattcccttttcatggtgacgtattcccgcgttgagtgtgggttatccaaatgcatattggcccggagtttcttctgtttcagtatgctgtgtaaaatcccggggacactgagctggcgataattccgctcgcctgatcgactgtcaccaccccatctctggcgctatcgcctagtgatatcgaatttgacgccagaatgtggtaccacctcccgactttaaactctacctaaacttaatggtcctgaatccctcccctgcaaaccgtaacatactcatctcgacctacacgcttttt

SEQ ID NO: 4324 - DNA, 747 bp, Photorhabdus luminescens
ccagtatcggtgtcgcaatgggaagcggtaccgatgtcgctctggaaaccgcagatgcagcattgactcacaaccgtctgaccggtttgtcggaaatcatcaccctttcccgcgcaacgcacaataatatccgccaaaacattgctattgcattggggctaaaagggatcttccttgttaccagcctattgggtatcacaggcttgtggatggcagtactggcagattctggcgcaaccgctcttgtgacggcaaacgcggtaaggttattgaggattaaactgaaataatgaaaatcgtctagctatttaaggatatgagtcttattcgcggctcatatcctgtgccatagtaagatgaattcagtggtgaaagcccattaacgttcgaagacatggtaaaaagcaaaaacgttcatttctcaacttagctgttatattcagagttgactctcttttttccgaaccagatagcgataaggcatttgttctgtttcttgagcaaccagttgatgctccataaaacggcagaaactgggaatatcacgcgtagttgccggatcgtcagcaagaattaataacatctgccctgcttccatatgacgcacagttttccgtaccatcattaccgggtcaagacagcgaagcccttgtgtatcaagggttttgtctggatgagtaaacacatcgggcataacttatctctacttcagtcagtctattagaccgaattatattataaaaaaga

SEQ ID NO: 4325 - DNA, 666 bp, Photorhabdus luminescens
ctttaacatactgcatccaaggcccactgcgtggcaggagtttgtggccaaatagggtgacagcaatgagcggtaatcccattcctaaagcgtaaagatagagggttaggccacctgccacggtattaccactttgagcaatgtaaagcagaatcgcacttaaaggggcggtagtacaaggtgagcaaattaatcccgctaacgcccccatagcgaatacgccgaaaagtgaaccgtttttttgctggttactccagttgactaagcgcgtctgaacagcggaaggcagttgcagagaatagaggccgaacatcgacagtgccagcagtataaacaatactgataagccgatcagtacatacggatgttgcagtgcggcctgaaattgtagacccgccgctgctacaatcaatccaagtagtgtataggtgactgccatgccttgaacatagcttagcgctaaccaaaatatctgttttaggcttttagggcgttggctgccaagaataatgctggaaatcaatggatacatcggtagtacacaaggtgtaaaggcgataccgatgccaatcaaaattgcccagagtggtgagaaaggcaaatgttggtgatcattcgatgcactttctggcgttttgtgaacaggttcagcagatatggcgtcag

SEQ ID NO: 4326 - DNA, 742 bp, Photorhabdus luminescens
  misc_feature (662)..(662): n is a, c, g, or t
  misc_feature (738)..(738): n is a, c, g, or t
aagctttatccgctgacaaaataccccatgcaccacaaattaaatctatagaaggatcacaaaaaagcccaatacccaccgaattctttgagctaatttctgacagacaataccctatctctttcaccctcaaatagaaatcagcgtaactgagagattcttcttgatcaataacaacatatccatctgcctggtgcttaagttgactctcaagcatatccatcaatgttattgcttcttctttaagataaacatcattgattgagtcacattgtgtaatattattttctaacattttcgataactttatataataataaaatgaatatctccgtagttaaaaatgacattttatctacggaattataagtgcctttttgctcatgatttatgacttatattttattaaaatcatgcaatcagttaaattcaacaaagacatacctttcgaggcagattaatacccttaccaattacattattcaatgctctccgaaaataaaacggttattattctccacggtaatactggagtatttttttgtagtttcgtgataaaattcatctcatcacgatatggaattatcaatcaattaattcattattctttaaatattccaatattattcaattggtgcttcttcggaagaaggaggaagcanaggagtacttgtaaattgactggatgctgccctataatagttaaaccctgttctttcacaattgattatcacatanaccg

SEQ ID NO: 4327 - DNA, 661 bp, Photorhabdus luminescens
  misc_feature (652)..(652): n is a, c, g, or t
  misc_feature (661)..(661): n is a, c, g, or t
taaatacattcttgccagaaaaattagattcagaattatggaagatattgagtgagcgtttggcgttctgcaatctggatgttaatcaaaaagaagactttgccaaattgaaggcaattcttaagcaggataatcggcctgcaatccattattttgcgatgccacccagtacttttggttcggtttgtcacggattgggccttgcagggctaaataaagagccaaatcgagttgtgatggaaaagcctttagggaccgatcttgaatcatccaaagccatcaatgatgaagtagctaaatatttcaatgagcgtcaggtttatcgcatcgatcattatctgggtaaagaaaccgtattgaatctgttggcgctgcggtttgccaattccttgtttgtgaataattgggataaccggacaattgatcatgtacaaattacagtagctgaagaagtcggtattgaaggccgttggggttattttgaccaagctgggcagatgcgcgatatgattcagaatcacctgttgcaaatattgaccatgattgctatgtctccttcggcagatctgacgacagaccgtatccgtgatgaaaaagaaaagtattgcgttctctgcgctgtattgatcataccaatgtgcgggagaagacngtaccaggn

SEQ ID NO: 4328 - DNA, 747 bp, Photorhabdus luminescens
tacgccaagtgccgtcaaaatgcgttatggtcatctgctgtcggctgtataacaggatgtcgcggtccagttgctgcttgtaagcgttgatcgcaggtgtgccgggcacatcgttcatctgctgccgtctttgctgcaatgtctgcaactggtcgccgacagaaacggggctgtcctgcatctgaaaatgctgagcagccagcacactcagcgtactctgctgcatttcctgtaaccgctcgtctacctgcctgatgtagtcggcacgctcatcaggcctcatattaaaccattcggtctgacgacttgctgcctcaatctgtccatcgatcagggtattgagcaggttcgtgaagtctttggatatagaaaccattgcaatgctcctttgcctgtttttaagcgaaacccttcgcgctgcgaaaagctgtttgtcgtttgtcgtttgtcgatacagatttgacattcttcccgacctaaagaccataactttaggtacgaacgtattcagttaccgcagggattcccgcacatacggtcgagtcgaaagcagatgtcattttgcattactttatttaagtgatagttacatatcattgttatttatattcgtgaatattagatagtcaacatttattttgctctgtagttggagtcataattatcccctctatttttcgtttataattgggatcacatgagtgatgacattgaaatataattaattttttgatatttaaataaaat

SEQ ID NO: 4329 - DNA, 666 bp, Photorhabdus luminescens
  misc_feature (502)..(502): n is a, c, g, or t
  misc_feature (511)..(511): n is a, c, g, or t
ccctctcctttggtgcctctgatgtctcgacagtgggtccatgagcagtttggtgaacctaagaaatcacagcaaccccaaatggttatgaaacgtcagtttggatggaaagagttatacacattgcttgatttccacattcctacaagtatgaagatttcttatgacatgatggaacgagtaaaatcggtaacgtttttacttacctcagaagtacgttggtaatcaacaatagatgggcgattatttttaaaagccaattcatttgtgaatggtttgaaaagtcaaatctccaatgaattagctgaatcaagaatagaggtgatataaataatgactatcaacgttgaagcgttaattaatagcttggggaaaacctatcaggaaatttttgatgaaggattaattccttataaaaccaaaccaacaggataccctggagctccagatattactttaagtatggctaaagagggtattcatttagcgtttaaaagagatnggtagattntatttgctgtagagctttttctgcttgatcagaagagaccttcataccaattccctaatgaattacctttttctttggagcctttgatgatcaggaaatgggttcacgagcagtttggtgagccagaaaggctcttccccgcgaaatttctaagg

SEQ ID NO: 4330 - DNA, 766 bp, Photorhabdus luminescens
  misc_feature (641)..(641): n is a, c, g, or t
aacagcttctatcaaaatgtattaaacactcctgctgcacaacaagcccggcaatatctggctcagcgggggcttagtgaagaaattatccaccgtttctcgattggtttcgcacctgctggttgggacaacaccttgaaacggtttgctcataatgaggaagatcgtcgacagttaaacgacgccggaatgttggtcgcaaatgataatggccgtacctatgaccgcttccgcgaacgaataatgtttccaatccgtgaccgtagagggcgcgtaattgcatttggtggacgtgttctgggagatgcactcccaaaatatctcaattcaccagagactgaaattttccataaaggccgccagctatatggcctctatgaagcacaacaaaatcacagtgacctttcacgattattagtagttgaaggttatatggatgtggtagcactggcgcagtttggtatcgattatgcagttgcctcactaggtacttcgactacatcggaacatattcaattacttttccgcgctactgataacgtcatctgttgttacgatggtgacagagccgggcgtgatgcagcatggcgggcattggaaacagcgctcccttatctgaatgatggtaggcagttacgttntatgtttttgcctgatggcgaagatcctgattcactagtccggtagggaggtccggaagcatttgaacaaagaatggaacaatctcatacattatccgaatttctgttcgaatcattgctaccac

SEQ ID NO: 4331 - DNA, 684 bp, Photorhabdus luminescens
  misc_feature (592)..(592): n is a, c, g, or t
tggcaacgccagtggcaacagtaccaacaccgggttctgaaaccagttttactgagatcagcgcattggggttgatctgttttagatcgaaaatcaactgagccaaatcttcaatagagtaaatatcgtgatgtggtggtggagaaataagtgttacgccgggtacggaataacgcagttttgcaatatacggtgttactttatcacccggtaattgcccaccttctccgggtttagcgccttgcgcgactttaatttgaatcacatcagcgttgaccagataagcaggtgtcacaccaaaccgaccggaagcaacttgtttgatacgggaaaccttttttgttccataacgtgcgggatcttctccaccttcgccggagttggaaaaaccacctaacgtattcatggcttcagccagagcttcgtgtgcttccgggcttaatgctccaatcgacatcgcagcagtatcaaagcgtttaaatagctcttcggcaggttccacttcttcaataggtagaggctcagcttctgttttatcgccagaaatcacggattgtggtaattggacgctgattaaccaaacgagaatatntcaagtaatcgttatattcgccactatgaaccgcaacctgtaaagtgctgaccacatccgggttataagcgtgatattcgccgttatgacat

SEQ ID NO: 4332 - DNA, 754 bp, Photorhabdus luminescens
  misc_feature (676)..(676): n is a, c, g, or t
  misc_feature (735)..(735): n is a, c, g, or t
ctgcactcccctgttccgctgttggcagaatctgtaacaacatcccaccagcagcaactctgccatcttgaatgccagtacgaataaagagacgagtcggtagctgttcagactgtctgaaataatcatcaagacaatccgccaatgtttcaccttccagtgcaaccactccctgataacgctcaccatgagttggcgtaatggtaataaccatatagcctgtacccaccatctgtttcaagctgctattttcagccactaatccatcaatacgagcaacaccacgcatttgttgctgatgattaccattaataacggctaatttgaccgggccatctccctgaatctggaccgtaatatcgccatcaaatttcagggttgcagttaataggctggttgctaccaacagttctcccaataattgctgtaccggctgagggtaatcatgattttccaaaatatgctggtaagtttcactggctaaaaccagctcaccacgtacagaataattcttaaataaaaagcggtgtaattggtcttgtttaaacataacaatctctcattcgagcaggttattcctgcccatttaatttggtgtttttaaacttaatcagcgtgcgtctttcttttttatccggccggcgatcaggatgaggcatagttaatgcattcattnttcgagcaattgccattttttcccggttagtcatactcgcttccgtctcttggtaaagntgttgcgcctccggcgcac

SEQ ID NO: 4333 - DNA, 676 bp, Photorhabdus luminescens
atcacggcgagggaaccaactttcttcttctgaagcgtaacgagctgcattaaggcctgccaagagtccttgagcagccgcttcttcataacccgtcgtgccgttgatttgtccagcaaaaaatagaccgtggataaatttactttctaatgtttgtttcagatctcttggatcgaagaaatcgtattctattgcataaccaggacgaataattcgagcattttccattcctttcatggagtgaacaatttgcatctgtacgtcaaacggtaagctggtagaaataccgtttggatagatttcattactagtcaatccttcaggttcaaggaagatctggtgggcatcacgatccgcaaaacgcatgaccttatcttcgattgaagggcagtagcgaggaccgatcccttcaatgatccccgtatacattgggctacgatctaaattattgcggatcacatcgtgggttttttcattcgtatgggtgatgtaacacggtatttgttgtggatgttgcttcacatttccaaggaaagagaatactggcgttggattatcacctagttgttgtgttagctgactaaaatcgatagttctggcatcaatacgtggtggtgttcctgtttttaatctgtttacacgtaaaggcaattcacgtaagcgctgtgccaacgaa

SEQ ID NO: 4334 - DNA, 759 bp, Photorhabdus luminescens
aagcttctgttgcaagaggcaatcccattttcactaaactaagtagtaagcggcgggcaatatgcaggccagcttccacatcaaatgaaccatccatgtatggatcattaataagacctttccaacccactgttgttcgaggcttttcaaaatagacacgcatgacaatgtacaagctatcactcaattcagcagaaagagcggccaaacggtgagcataatccagcgccgcatccacgtcatgaatagagcaaggaccacacactaccagcaaacggggatcacggcgctgaataatatccgcaattgttttacgtgcatttgcaataacatgcagatcatcatcactcagtgggtattgttgctttaattcttttggggtgataagaatttgctcaccactgatgtgaacgttattaagtgcatctctttgcatgaacatgtcgattttctcctcaaattatcattctgtactcatttgtttttatgccattgaccaataacatatcacgcgtcgtaaagaatacaatccaaaagtgtaaccaatccaaaacactgtaaattatttgtttaaaaaaattaaaaaagagtcaatttaagtgattaatctattctattactaatttaatagattaaaatatttcatatagaaaaatattataaatggtattctaaaataaattcacatctcaacccggagagaattatttttgcaatattcatgatattaaccctttattcccatttaaatgatcaggt

SEQ ID NO: 4335 - DNA, 673 bp, Photorhabdus luminescens
atttgaatgttactgatagccatcattgttatggatctgccacgcttatcgcacaggagatccgtcaatccatttttgatgaattacaattgacggcatcagccggtattgcaccggtgaaatttttggcaaaaatcgcttctgatattaataaaccgaatgggcagtatgtcattcctcctgatcgagtggctgattttattaaggttttacctttgcgaaaaattccgggggttggcaaagtcatggtgcaacggctggctaatatggggctggaaacctgttctgatgtacaaaaatatgacgtcattgttttggtgaaacagttggggaaatttggtcaggtactttgggatcgttgtcaccggattgatgaacggttggtgaatccatatcgtttgcgacaatcaattgggtgcggagcggacactcgccagagatattcatcaatgggaacagtgcacctgacctgtagaaagttcatatctcgaatttagaaaacggctgacatacgtacaccctatcttctgcttgcccgtccggggattaacctgaaattagatgatgctaacctcctcctcacggagctgttctccacttttggccacccggatttccctgttttgcccccatacctgccatcctgccgggaggggcggccgtacttttgatg

SEQ ID NO: 4336 - DNA, 765 bp, Photorhabdus luminescens
  misc_feature (754)..(754): n is a, c, g, or t
  misc_feature (765)..(765): n is a, c, g, or t
tcagggcaaatgcactgatcaacattccttccaccagcaaatgaggaagttgttccatcagcaagcgatctttgtaggtacccggctccatttcatctgcgttacatagcagataacggatattcatgctttcatcttttggcatcaggctccacttcagaccagtagagaaacctgcaccgccacggcctttcagcccggcgtcttttaccagagaaaccacttcatctggggacatgcttttcagtgctttttcagcaccacgataaccacttttgctacggtactcatccaaccataccggttgtttgtcatcacgcaatcgccaagtaagaggatggttttcctcagtaagaataatttcttttattcctgaatatgctgtcatggatactgctccagtaacttctcaatctcttcaggtctgacagaactgtgcgtatcgtcatcgatcatcatggtcgggcctttggcacagttacccagacaacaggttgggaacagcgtaaaacgcccatctttcgtcgtctgtcccggacagatatttagatgtttttaatttgcagcctggacatcttgataaccggtaatatgaccaaccacgctgtcacaataacgaataatatggcggcccacaggttgacgataaatctggctggagaatggtgccacaccttccacatcactagcgggaattaccagcacatcagcaatcgggtaaatggcaccatccgggacccagccacgatgcttntgtacaatttn

SEQ ID NO: 4337 - DNA, 676 bp, Photorhabdus luminescens
  misc_feature (487)..(487): n is a, c, g, or t
tagtaagagatgctgctatcgaagacactatctcaatacttgaatctcccccaggtagaaaaccacaaagagaactaattgaactatctgatttttataatgaaaaatcgaaggaagagaaagagataatcaataaaataataagaatagtagctgataatacattgttcggtattctttgtgttattgatggtgtacgtgcaatagaaaatgatgaaaataaaggtgagctaatattgacctataaaaaggaaagtatagttaacttaaataaaaatagtaatctgcacgatatatataatgctagttaattaataaagccggaagatccccgagatcttccggctttattatgatctaccttggtgcatatccacagtaaaccaacgcagattggagcttagagatcgcatctttgatctgatacgcttcctcgtcattcacggcacaggcacgtatctcccgcccgtccgcccccgcgggcggnggctcctcgctgaaaagttcacctgcgggcctggcccgcccgcacccggccacccgggttagcggtgcaggcaagctgcaccgtcgccacgggttcctgataaaacccggttctggcagaaaaagcgggcgaaacccggactgactcggggaaaagggagctaaatcggcaaaggcacatcggggtttg

SEQ ID NO: 4338 - DNA, 764 bp, Photorhabdus luminescens
  misc_feature (658)..(658): n is a, c, g, or t
cacttacccctggggtatgaccatgattaagaaaggtatcagcatctgagtctcgactgtcccaacctgagcggaatagcaaccaaccacctacaggtaaaggtccatggacttcgcaccattgatcgacatgttcacgttcgagtaaaaaatctggggctgttacttgatcagatacatcaattacagcggcaggcgcaaccaagtgtctaggaggtacacttgagacatcgatagaatctttgcctgaccgccaatgaacaggggcatcaaaatgagtccctgtatgctcggacatctggatattattccaataaacttctttgcctttttcgtcataacggcttattttttccaacttaaaaggccaaggttgccctcgttcaggcggcaaacgaatcacaggtgtttccgttgacaacggcgctgtaaggtcaagtacctcaactttcccctgcatgaacttcgcatagattgaagatgtcatagtattaagatttccttattctcattatgggcttaatagacaggggttgaatattcagatgtcgaattcgacatcacctcgtcttcataagcaacctgaagcttacgggtcatcaaaccaggacgcccgtccccaatagactttcggtcaacactaatcacaggaacgatntcagcgagagtgccacaggtgaaaacttcatcagccaaatacaacttcgtacgatcaatttcttctcgttcacattcaaccgaaagcttatccttcgctagtctat

SEQ ID NO: 4339 - DNA, 677 bp, Photorhabdus luminescens
  misc_feature (599)..(599): n is a, c, g, or t
cttgtgttatttgacaaatacagttaatacagaaaatattccgccgtggtggcatacttaattaaacaacagagatagcaatgatgcaggatttgcgtctgatattaatcattgttggtgcgatagcaataatagctttgctgttacatgggttgtggaccagccgtaaagagcgttcttcgctttttcgtgatcgcccagttaaacgtcataaacatgatcgtcagaatagtttcgtcgatgacagtgatgatgaagcgttcgacaatcagcaaaagccttatgcccataagcaggtgaaatctcatcaggagtataaagctgagccagctatcgagcgtcgtcagcaaaaattgactgaaattgatgctgcaacgcctgaagaaagcgatgatccgttgctgacgggccgtcagcctgaaacgacagcgagaagggcagctatagaagagcaggaaccccaactcggtctgtttgaatttgaagagcagaatgagtctgaaagatacggatctgcgattgaagaaaaatctcaggaggcggctggcgaaaagaagctcagaccaaagtgaaagaaattgttttggttcttcacgtancagcacaccacggccaggaattgaatgctgagtccttgctgcaagtattctacaatctggtttcagtttggggaaatg

SEQ ID NO: 4340 - DNA, 734 bp, Photorhabdus luminescens
catattagatcaagcttgaaacaagcaatcaaaatggctcttgctggggatgaatcaacagataaagaaattttacgctgtatcactacacttgtaagtcaagaaacaaacaaaaattaaatacaatctaaaaacgaggcatattggaacaaagagaagagctagagtggatgtggatactgaaacaactgaacagattaaattacttggccccaaaacctatcactactcaataaagggagtgattggatggagcactatcgatataacagagaaatcagcactcaataacaacagggcgctttgttaacgtaccagaacgctcagccagctcgaaagcagctttggcacggcgcatgccctcgattttgcgctctcttatggacatttgcttaagttcagaaacttggcgttttgattgcataacctctccccatctcacctaaattgatgataatttcatatggtacaccaacattaggcttgttgaaaattcggtcataaaactctaagctttcgcgtttccgcatagcaaatatgccttagcatataaaattgatagtgcagaccgataatctcgttaatgctttacccacctcatcaagccctgataccaagcttactgaaatagcatctggtgggggagtgcgtataatcaccactgtcaaattctctagacggcaaacttaactaatagcaccgctcaggatggaaaaccgacttttctagcgctg

SEQ ID NO: 4341 - DNA, 677 bp, Photorhabdus luminescens
ctgttcgtgccagaggactggattctgtaccgaaagtgacgcgagatccggaagacagtggaaatgtttacattttcagtgatggaggcaatacccgttaccaaatcctatgtgaattatggaaagaaacgggtgaggaacgttttttccgaatcccttgtttgtttaaaccctggcctggtcggttgcagtgtgtcattgggcatctggcagaaaatgatgttcggggggatttaacgtttatagagaaagccgcttggtgtttttaacgcaagtcctatgcatgagaaatgtctgggaagaccgatctcacaacgagaattgacagatttattaaaacacgaagggttttcaatatcacaaaccagcatcattcagatgcataacaaggtgcaatattcatattctgatatgcctaatttgttgatatcgggtatggtgcgtccgttacccttatacatattgtctttactagttgactgtccacaaacttgtcattcctttttttttacagcgatcccgtggaacggattgcgatatcactgttcgttgaggcaatgcacacgccttcagtaatcgtgacatttatttattttaaccgttccgcggataacttctcgggtaattaacaaacgtctgcaccgtccctcctttatttcctctctgtgctcttagat

SEQ ID NO: 4342 - DNA, 755 bp, Photorhabdus luminescens
ttacgccgtcgtgcgctcattccacgcatcagcatgaatgatgttgccgtctttgtaggtccaggtgattttttcgtaacgcaactcaatgcgttccagatggttgtgcttctctttggtagggtctttgatgtcatgcatcagcggtgccactttcaccaccttcacgttgtccagttgggtgatgaagtactctttctcctgacctgcgtcgtcaatgttgtaccatttgatttcagcagatttcagggtctggccggtggtgaccgctttatacaaatagggacttgatgcatccacctctttggtgaataccaatggggcatgcacacgggtccccgtcagtttgccggtattgttgtccgtcgggatgtgcaacatatgttccaacgccacaatttcaatactaccttcccggccccgtacctcgacagagcccttgatgtcagcaccgccgtcatctttcagccataaataagcgggaatcgccataatgattactcctaattgttacttaagtgatgtcgccggtagcggcgacgttgttgataaggtgtccggtactttctgcggtcgcgcacaggcggccacatgcggtatcagacggatttcaaccctgcgattggcagctcgccccgcagcggttgtgttagtcgcaattggactcgttgctcccttgccttgtacagtgaagcaagccggcgatatgtcgcttggttgaacatccaatcgcgtactgcttcggcgcgtgccag

SEQ ID NO: 4343 - DNA, 674 bp, Photorhabdus luminescens
aataagctcctcactgccatcaagcggtaataataagaggtgagaaaagaatgactaaacaaatcatgccaataacactgtcttatgaaccagcagcagcttgctggggtgaaaaagcgctgattagttccagtgagcaaggggtgatggttcacctggttggtaaaggtaaattaggggcagtgcaacgtgctggacgtaaaattgacgggcagggaattcgtcatgtggctctggtgggtgaaggttgggatttagagaaaagttgggctttctggcaaggcttccgtgcgccgaaaggtaatcgttctattgaatggcctcaattacctgcggctgaaaaacaggaattggaaagcagaattaaaattattgattgggtgcgtgacaccatcaacatgtcagcggaagagcttgggccggaacaattggcgaagcgtgcgattgacctgatgtgtggtatggcttgtgaatcagtaagttatcccattattaaaggcgaagatttacgtgagcagggttatacgggtattcacaccgttggccgtggttcttcgcgtgatcctattttgttggcgttagattacaacccaactggcaacccgcaagcgccggtgtttgcctgtctggtaggtaaaggcgtcacatttgatactggcggctcagcctgaaca

SEQ ID NO: 4344 - DNA, 739 bp, Photorhabdus luminescens
agctatatcaacagatcccgttgggagggacggaacctttgtcggccattttccatcactcgtcttgatgggacattgccctggataaagagactcccctagtttggagaaagtggagagcgccaaaatatcttttgctttatcaattgagtaatgtgtatcttcggaataaaaaagtacgggtgtaagcgagttctcgttaccacctacgaactccccttgttcaagggagctgttcgcattcgaatcaacccagagaacttttgcagctagataatcacgcgcattgcgcagtgcatataaattcccctcagtgcttcccattgacaacacatagccccagtatgcctcgcccggagtggtgctatctctgccaggagcgttccaaagtttagcaaaataatccagtacggcacgctcaacaaactttgagttaagtctgaaattgcccgccataaacgggtcgccaacattatttaactgaacatctaagtacttgctaaattccgatgaatagtggagttcttggttggcttgatagccaagaaatttttctcgcgttttctttacatacgaatctaactctgccagggcctgccctcgttcagcatctgttaatccgtgttcagatagttcaaacagagattcgttaattgccacataagtttcattattcatatttggctcccatgtaatgatctattaagggcaacgggattgttaagcatgggttatatct

SEQ ID NO: 4345 - DNA, 659 bp, Photorhabdus luminescens
tggcagtatgaattgggtgattacgccaccacgtttattcagaccggtacttggaatgaccattaccgtggtttgcaagtgggagaaactctgcaactcaatttgctccaaatggaagcggcatatttagttcgtcatgagcgccgtcttaatgtgatccgtactgtgtcgctcaaaagcctattgggtgatgatggctttggtaagttaaaaactgagggcaaagttgactttccattaagcgaaaagctgtttgacaacgactatccggggcattatttgcgccagattaaaaccgtgtcagtgacactgccgacgttgatcgggccgtatcaaaacgtgaaggcaacgctcacccagaccagcagtagtacgctgctcacagcagatatcaatggtgttaaacgtctcaatgatccgacaggtaaagagggggatgcgacgcatattgtcaccaatctgcgggccagccagcaggtggcgctcttttctggcattaatgatgccggtagctttgagctgcgttttggaagatgagcgctatctattcgttgagggcacgggtgcggtcttcaaatggacgcttacccttcccgcgttcggtggatgagcatattgaccataaaacattgaaagctgatgagatgcacgccgcactg

SEQ ID NO: 4346 - DNA, 753 bp, Photorhabdus luminescens
aagcttgaaaactccaaagcacaggatattgtttcccttgatgtccaagggaaatcaagtattaccgattgcatgatcgtctgtaccggaacttccagccgccatctgatgtctgtcgcagataatctggttgatgactgtcgtgcgagcggcctgatcccactcggcgttgaaggacaaggcgtatctgactggattgtcgtagacctcggtgaagttatcgtacatgtcatgcaagaagagagccgccgcatgtacgaactcgaaaagctctggagctgagtttgaagctgcaattaatcgctgtaggtacaaaaatgccggactggatacaggccggctttacagattatttgcgtcgttttcccaaagacatgccatttgatctgatagaaattccggccggcaaacggggcaaaaatgcggatattaaacgcattctggaaaaagaaggcgaacaaatgctggccgctgtcagcaaaggcagccgtattgtcaccctggacattccgggttcccgttgggaaacgcctcaattggcgcaacagcttgaacattggaaacgggatggtagagatgtcagtttgttgataggtggacccgaaggtctcgctccggcatgtaaagctgccgcagagcaaagctggtcacttgcaccgctgaccttacccatcctatggtccgagttttatttgcggaaagccctgtccgggcatggagtattacgacccaattatcctattattcggaata

SEQ ID NO: 4347 - DNA, 662 bp, Photorhabdus luminescens
cgccaaagttggtattcccggccgcgatgactccccggatgaatgcccggttttcggcgatattgagaaatcggatcacttgtggtggaacagcgcctttagtactgccgccaccgtaactgggggtcagtaaaatgtaaggagaagttatatttaatgggctgtctgattgatttattggaatacgaaaggctggtatctccagtttctgaacaaatctatgactattactcgatgaactggagaaatagatcagcggatttatattcataataaacctatacattctcgattaatgcgttgattttatctggacgaaatcctgaccaatgctgtgtacctgcaacaaccacaggaatttgctgatagcccatagcacggatagtcgctaaagcctgcgggttttcggttaaatcgataatctgataaggaatatttcttcggcttagcacctgataggctgcgctggattgtacgcagtccggtttgctataaatggtaatgctcattaccgactcctttgtcagtttgggggcatgtaatggccaaatttgggtcatgagtgataatctacctggaggccacaacttgattataccatatgtagcgaaatttatttcaccgcccctattatggggttgattcacatggagtgactttat

SEQ ID NO: 4348 - DNA, 750 bp, Photorhabdus luminescens
  misc_feature (572)..(572): n is a, c, g, or t
ttattgggtatttctggatcacctcctccaacgcatccaaatcaataccgttttgtggatcagttttgatggctaccgctttcagacgtaaacgttcaatggcctgtaaagcaccgtaaaaagccggtgattcaatcaccacccaatcccccggttctgtcaccgactgtaaactgaaactcagtgattccatcgcacccgcagtgatgacaatttcatcaggagggacatgaataccatgcattgcataacggcgcgatatgttacggcgtaacttatcattacccggcggtaaattagctaaagcgctatgtggtgctattcgtctggcagcagccgctaacgctttggaaagtttaggttgaatcaataaggatggatctggaaatgctaaaccaaacggaataatcgcaggatctttgcacgcctgtaatacatcaaaaatagaagcgcttatttccacgctttcacttaaatgtaatcgctttcccccttttgctgcggcaaagggctgcaaacgtttagcgacgtaataacccgattgaggccgggaaatgatccatccctgactntctagtaattgataccattgaacaacggtcatcaaactcaaacctgataacttcactgattccctcaatgaaggtaatctatctcccaccagccaggtaccatcttcaatatgttgaagaatttgccctgcaaattgtcataacgcttcatcaattcagacctctccgcaaactgttt

SEQ ID NO: 4349 - DNA, 668 bp, Photorhabdus luminescens
tggtgagcatattcgtactgttattacccgcatgttagaagttgccttattggtggggggaatgatggctgccaacgccattctgccgggcatgggatttatggtggtggcggggatttatctactcaaccgtacggctaaacgtcctttggttgaaatggcgattgggccgattgcaacgattgtagttggggtgctagctaacgttatttatctgttctccccctttattttgtgatgataaaaatagagggggggaagtgagggagaacaggagaacagatagtgaacacatatccattacctagtctgagcatggagcaggcgcagcacaaacagtttcatttagttgacattatttgccgccattttcccggtgctgatttcctcaccaccggagatttagggctggtgccgggattgaaccggccacagataacgcaacgtgttgaacaggtcattgccgatttcttttctgctgaggctgctgtgttagtacaaggggcgggaaccggggcaatacgttgtgggctatcggcattacttaatgcgggtgatcgcttgctggttcatgatgcgccgttatatccctcgacggcgattattgccgagcagatgggcttgcatctggtgcgggccgatttcatcaatccgaacaatacgagctg

SEQ ID NO: 4350 - DNA, 754 bp, Photorhabdus luminescens
  misc_feature (736)..(736): n is a, c, g, or t
aagcttgtgccgaaacggctacagtaccatccactgacaacgccccagatttatccaacatcaatcccccattgggctgtagccttaacgcaagcccctccggtttcaccgcgatgccattgccagtcttaaccgccaaacggttgtcgataacctgcaaaccgccccccggatgataagcttgagcaccatcctgccaaccaaaaagctgtcgccacaacgtggcccaatcaatcagtgaataaaacgccgcctcagtcgggatcttgccaggggcgaagtgggtaccaagctgactgaccgtttcatctgttatctctttcaccatcgtcttttcctcatttagctagtcgtaaaggtaaactttcccttcgccacttttccagccactggcaccaatcgccaatgtattggcgtcaccgctaaaacaaacaccggcaccaaatttatggtttgattccccatccagctccagtaatttgctctgcataatccattgttcattctgatagctaaaccaccataccgcaccggtttgcacacctgtgtcatttttaccaacaggtgttgacaccaccagcatctggccgtcactactcaaagagagttcgctgccaaacctttccccggcagtcaccgcttctctcaatatccctataacttgccatacattacggtgacgctggtacagatagaccgcaccaatattgttcttctctcccgggcaccccaccgncagaatattgccgctatc

SEQ ID NO: 4351 - DNA, 667 bp, Photorhabdus luminescens
  misc_feature (667)..(667): n is a, c, g, or t
tagctggcaggccagcgcatactcaacagtgaacagcgcaggttgggtataacgtgtagcatttaaccggctgatagcattgtcgcgctccgattgcggataaatcaactgcctgatatccagtttgatgtgtggctgtagcagttcggcacagcgatcaaattgctggcggaatacaccatcacgcagatagagcgattgccccatttcaatagactgactgccttgtcccggaaacataaaaatcaccgcacgaggctgttgtttgcgattaatcgtctgcggtgatagttggcgtagttgattgattaattgctcccgatcttttcccacaacaaaagcacgctcactgaaagcgctgcgtccttgttgcaaagttccggcaatatccgctaatagctcattaccggtagtcaatgctactgccaagcgttccccttgctgaagcaacgtttgcggcgttttcgctgaaattggcagcagatgccagcgctcgtcatctaatatacgggcatcttgctggcgcggagcttcttccagaataaggtgcgcattactgccgccaatgccgaaagaacttacaccggcacgacgtggctgacttgtctgcgggcacgggcatgctgtattgatcacagaaaacggggtctgttcgaaggggattgcn

SEQ ID NO: 4352 - DNA, 768 bp, Photorhabdus luminescens
  misc_feature (698)..(698): n is a, c, g, or t
agacgagcgcagtcaggatattatccgttgccgctggttagatgatgataataaatctaccctgcaagagttggcggataagtatggtgtttctgcggagcgtgtacgtcagcttgaaaagaatgccatgaaaaaattgcgtgtggcaattgaggcataaatagagtgattttgcgttaacgcattcataattaaaaaaggcgataatggtttatcgccttttttgtttcatttttcattgttgtcatctaatcctatgaaaattgttattgcgcctgattcatttaaagaaagtctcagcgccttacaggccgctgaagcgatagaacaaggatttcgtgaaatctatccacaagctgaatacattaaattgccgatggcagatggaggagaagggacagttgaatcgatggtagcagctactggaggaaagattgtacgtctgttggtcactggtccgttaaatcagccagtggatagtttttttggcgtgctaggtgatggagaaaccgctgttattgaaatggctgcggcttctggcttacatttggtgccgatggaaaagcgtaatccgttgataactacgacttatggtaccggtgagctgatgttggctgctttggatcaaggtgtcagaaagataattttaggcattggcggtagtgcgactaatgatggcggtgccggtatgatgcagngcgtgggagcctgtttgcttgattctgatggtaaagcgttggggcttggcggggctgcgctaagtcggct

SEQ ID NO: 4353 - DNA, 683 bp, Photorhabdus luminescens
  misc_feature (590)..(590): n is a, c, g, or t
  misc_feature (608)..(608): n is a, c, g, or t
  misc_feature (653)..(653): n is a, c, g, or t
  misc_feature (656)..(657): n is a, c, g, or t
  misc_feature (683)..(683): n is a, c, g, or t
ctattttccgccggctaagcgtattcgacaacctgatggctgtattggagatccgccaggatctgactcaagaacagcggaaagaacgtgccgaagagctgatggaagagttccatatcagccacctacgtgacaatcttggtcaatcactttccggaggtgaacgtcgccgcgtagagattgccagagcgctggcagctaatccgaaatttattttgctggatgagcctttcgccggcgtagatcctatctcagtcatcgatatcaagaaaatcattcagcatttgagagattatggactaggggtccttatcacagaccacaatgtccgtgaaacattggatgtatgcgaacgtgcttatattgtcagccaagggcatctgattgctcacggcacacctaatgatattcttaataatgaacaggtgaagcgcgtttatttaggcgaaggtttccggctctaattcggccaggagaattgatttaacgctatgaagcaaagtttgcaactcaggcttagtcagcaactggctatgacaccacagctccaacaagctattcgtttgttgcaactttctacgcttgaactncaacaggaaatacaacangcgttagaaatgaatcctttgcttgaacaggatgaagaacatcangannattggcatcaggaactttccgataan

SEQ ID NO: 4354 - DNA, 758 bp, Photorhabdus luminescens
  misc_feature (691)..(691): n is a, c, g, or t
aagcttgtttttagatatcttatcagatatgttttaaatatcaatatagcatcttgacaggtttttacaggaggtcattgatgacccgcgttcccgacaccgatttagtccacttaaagcaaaccgtctcgttactggggctggcgcgtaagcaaggccgtccgatgaaaaaacgcggtgaggattatgtgctgcgctgtccgttccataacgagaaaacgccctcaatggtgatatcgccggctaagaacctgtatcactgctttggctgtggcgcagcggggtcggtgctggactgggtgatacaaacggaaggggtgacgctgaaaatcgctatccgccggctgcgggagctggccgggttgccggacatggacaatgcagttgtggccgcttcttctttagccgccccgccggagtcacaggcggcccccctgccgcgcccgaaactggccgacctggacgatgacgggcaggcgctgttgcatcaggtgattgatttttatcatcagcacttactggcatcaccggaagccaaagcctggctggcacgacgcgggctgaatcatcctgaactggtcagccacttccggctcggttatgcgggtcatcacggtatcagcggttccgcgggattgttgccgtccaaagacagtcaggaaggtcagcagttgcgcggcaagctgtcggngctgggcgtgttgcgtaccaccacccggcaggaccacttccggggctgcgtcgtggtgccgataatc

SEQ ID NO: 4355 - DNA, 672 bp, Photorhabdus luminescens
tcgttttactgtcgatctagaacaacagaaagtccacgctggcaataaaagctatgattttgaaatcgatagtttccggcgtcactgtatgatgaatggtctggatagtattggcctgacattacaacatctggatgccataataacctacgagcaagaacaaccggttttcctacgttaatttttccgttattgatttatcccgtagttttctactacgggatttttctatcacaagcaaaaacaataccaccacgtcaatactcatgcagacaatcattttttcagtcatatacagggttttaactaatatttagtcatcccatatcacatttaaaagaaattaacagatagaaatagctatagtggctggacaaaacgcctccaataccggattattactcgctttaaactgatatgtaaaaaagaagcggggagtacataatgtacaataagaaaaaaagccagtaagctttcttactggctggcaaatcaccattactcaagaaaattgggggagaagccagatttcgtctggcctattgagctactttcaatatggataattatcgtctcaatataaggaaataaaaattgatgaataatactctggagttcctcttttatgcccagttcacgcttacaacaacaattcattcgattatggcaaca

SEQ ID NO: 4356 - DNA, 756 bp, Photorhabdus luminescens
  misc_feature (627)..(627): n is a, c, g, or t
  misc_feature (756)..(756): n is a, c, g, or t
tactgtagctgttcttgctgaaccagaagaaattgtattacctgaatcccgtacctgttcattgaacgctgaagaactgaaacctgttctggtcgctccggctcctcatacaagagccagaggtgttaaatcttaccgtgataaaacaaaaatcagtaaggtcgttgctgctaagaagccatatgtaagtatttctgactctggaacaaatactcttctgaaaacaacctcttctaaaaccccaaaaaggccatccagaatcgcccctgaacatgttaaaaggatacaggctactccacgtcaggataatatctttaaacgcttcactgctcttttagttgattttatcagagataaatttatatgggctaaaacgaacaaaactaaagttgatattatcagtgaagaacatgataaacgtattgctgaaaactatgtctttgatgaggtattaggccgtcgtgtttcacgtagtgaatatgagaaacaagctaagtttaaccacgatgactataagccaacaccggatgagatcagccgtttcccaagtcgtattaatagcgttaaatccgttagtgattacgataatgggacgtcaccttcattaccactcgaactaattaaggnggtaaactttcttaaactcaagccatcaagctctaatatcattaagaacaaatgacaatcaaacatttttgatataaaatataaaaattactcaacagtgattggtttgtaaaaatggaacttataacn

SEQ ID NO: 4357 - DNA, 677 bp, Photorhabdus luminescens
  misc_feature (491)..(491): n is a, c, g, or t
  misc_feature (568)..(568): n is a, c, g, or t
aataccgtgacttgattgataccctatttctcattaccactgtaataattttgggtgaaaataggatgatttttaggtattttgttgtgaaatacacagaggcaaaattttggtaaagcgaatgaacggaataaattaaaatacactggttagggtgatgaattcaaagctggagtatttattagtttatgatgtacaagatcatgttttcgagctaaatttagcagacaaccagataatcattttgataaggtaggtaagagcctatgaatgaaaatggattgagtcgatttattgtcgattatattgaaagccgtaaacagtcaaagttggaggtttttgataaagaggctgaaaaaaaattggcaaaactaacctctatggaggatattacgccagttaaacaaaagttagctgaacaacgcaaggaattggaagagcactatgaagttagaaattggctggatgatgcagttagccgagtagatcanatccgcttagtgacacatgttctgaaatttgcccatactgatgcaagaggtaacagtattttcgcggtacaatcaanagcaaatgtaaaagaagatattaaatatctttccatggcagctttagatagacctgctatagatgcggcaggaaatgcggctgctcttgatattgcaaattattattga

SEQ ID NO: 4358 - DNA, 769 bp, Photorhabdus luminescens
  misc_feature (648)..(648): n is a, c, g, or t
  misc_feature (677)..(677): n is a, c, g, or t
  misc_feature (720)..(721): n is a, c, g, or t
aagctttcggccatctgacacactcctaattctagtactgttactatcatgctaattatggcgcggagtattagataggcctggcgttctgtaaaacaaaaaatttaaatcttaacgataaatattattggagatatatgtggacactgaattactgaaaaccttcttggaagtcagtaaaactcgtcactttgggagagcagccgaatcactgtacctgacgcaatcagcagttagctttcgcatacgccaactagaaaatcaattaggtactcatcttttcactcgccatcgcaataacatccgtcttacagcagcgggagagcgccttattccctatgcagaatcactgatgagcacctggcaattggctaaaaaagagataatgcatgcttctcaacatactgaattaacaattggtgccactgcatcactatgggaatcatatttaacttcctggttacaagacttctataaaaaacatcaggaattaagattggaatcccgagtttctacacggcaatcccttgttaagcagcttcattcacgtgagttagatctgttgattactaccgaaccgcccaaatggatgagttccaaagcctattattaggaaatattcgcttgaagtattaacaacagaagaanatctgaaatacaaattaaaattacatcanactagaatggggagctgatttccatcatcaggaacaacggatnntaaaaagtgatcagttacccaccatcacaaccacttcagcacatatag

SEQ ID NO: 4359 - DNA, 678 bp, Photorhabdus luminescens
  misc_feature (443)..(443): n is a, c, g, or t
  misc_feature (515)..(515): n is a, c, g, or t
cacactggtcgtagccgtaacgatcaggtggcaacagatcttaaactttggtgtaaagaatacatttcacatctccatcaggcaattgtggaattacaacaggtattggtgatcaccgcagagaagaatcaggatacggtgatgccgggttatacccatctgcaaagagcgcagcctattacatttgctcactggtgcttggcatatgtagaaatgttggtccgtgatgaaaatcggttacaggatactttaaaacggctgaatactagcccgcttgggtgcggtgcattggctggaaccgcttatgatattgaccgcgaacaactagcatcatggctaggttttgcttcagcgacgcgtaacagcctagatagtgtttcagatcgtgaccatgtattggaactgctatctaatgccagcattagtatgatccatctttcccngtttgcggaagatctcattttctttaatagcggtgaagcatgatttattgaactgtcagatcgagtcacttncggttcttctctgatgccacagaagaaaaacccggatgcactggagttaatccgtggtaaatgtggccgagtgcagggggcattaaccggtatgatgatgaccttgaaagtctgccgctggcttaaataaaatatgcaggaagataaaaaagggttgttgatg

SEQ ID NO: 4360 - DNA, 769 bp, Photorhabdus luminescens
  misc_feature (472)..(472): n is a, c, g, or t
agcttgcccgcagaagcgtggcgtatgtactcgcgtatataccaccacccctaaaaaaccaaactctgcactgcgtaaagtatgtcgtgtgcgtttgactaacggttacgaagtttcttcttacatcggtggtgaaggccacaacttgcaagaacactccgtaattctgatccgtggcggtcgtgttaaagacttgccaggtgtgcgttaccacactgttcgcggtgcactggactgttccggtgttaaagaccgtaaacaaggtcgttctaagtacggtgtgaagaagccaaaagcttaatggtactccgttaagtaaggccaaacattatttaccttaatgtcaaaataaactcgtagagttttggacaaccctgaattcgaaacggagtatttccatgccacgtcgtcgtgtaattggtcagcgtaaaattttgccagatccaaagtttggatctgaattactggccanattcgtcaatatccttgatggtagatggtcaaaaatctactgccgaaggcattggatatagtgcgcttgagaccctggctcagcgttctggtaaagagcacctggaaccatttgaacttgcattagataatgtgcgttcaacccgcggaaattaagccccgccgggttcgtgggtctacttatcaggtccaactgaagttcgtccggttgccccaatgcgtagccatgcttcggatcgttaaactgctcgtaacccgggataaatctatggcctgcgcctggcaacaattatctgtg

SEQ ID NO: 4361 - DNA, 692 bp, Photorhabdus luminescens
  misc_feature (443)..(443): n is a, c, g, or t
  misc_feature (468)..(468): n is a, c, g, or t
tctggataaattcacgcagtttggcaacttcctgctgctgtttcagcatcgcattgatcttgtcgccaatacctttcgcagccatgcccagatgcgtttccaagatctgaccaatgttcatacgtgatggtacgcccagtgggttcagtacgatatctaccggagtgccgttttcatcgtaaggcatatcttcgatcgggttgatcttggagataacacccttgttaccgtggcgacctgccatcttatcaccaggctgaatctgacgtttaaccgccagataaactttgacgattttcagcacacccggtgccagatcatcaccctgtgtgatcttacggcgtttagcatccagttttttctcgaactcagctttgagttcgtcatactgttcagccaactgttccaactgattctgtttctcttcatcaaccagacccagntctaaccaacgctcacgaagcagtntatccagtttctcagctttgatgccgcctgcaatcaaaacagaacggttacgtgcaaacaggccagcttcaaagatttgccacctcttctgtcaggtccttcttaccctgacccagctgaatctctttaattcacaaggcacgtttatctttttctacaccattacgggtaaatacctgtacgctgataaccggaccggatacgccattgatacgcgcagagag

SEQ ID NO: 4362 - DNA, 828 bp, Photorhabdus luminescens
  misc_feature (16)..(16): n is a, c, g, or t
  misc_feature (555)..(555): n is a, c, g, or t
cagcgtatgtcactgnacctcgggtcgctctagagtcaacctgcacgcatgcaagcttgaccgcgatatccgtgatccgatggaactgatggatgaagtggaaaatgagttgaatatcgcttgttgcccgatcacttggccgattgggtgcggtaagtcttttaaaggggtttatcacctctatcttgatgaaacttacctgtatcagaccggaaaggggcacacgattcaggaagtccgcgcaattaaggggctgaataatcctgaactggatgctgcgattggtgaagatctggctgaacaattgcgtcaggagctggaactggtgcagggggcttctcatgagtttgatcatcaggcatttttgcaaggtgaactaacaccggtatttttcggtactgcactgggtaacttcggcgtaaatcacatgttggatggtttggttaaatgggcacctgcgccgatgccgcgtcagacagatgttcgcgaagtctccgctcaggaagataaatttaccgggtttatctttaagattcaggccaatatggatcctanacaccgtgaccgtgtggctttcttgcgtggggtgtcaggtcaatatgaaaaacgcatgaagctgcatcaagtcagaattaagaaagatgtggtgattgctgatgcgctgacatttatggcgggtgatcgttctcatgtggatcatgcctatccgggagatattattcggttgcataaccaccggacaatccagattggtgatacccttactcaacgggaagatctgaaattaccggcattcctaactttgcgccggaattatatccaccgatc

SEQ ID NO: 4363 - DNA, 689 bp, Photorhabdus luminescens
tgctaccccctcaacgaataaatttttagaataaagtaatgctctatcaattaaaacttctaataaaccatttaatgcttttactacttgcataaaatcataagcacttttaagaccgtaaaggccaataaactgccagcgccctctgccacgccattcagaagaaaggtcaccgatatctactcccagatttaatgcagaagaagccacaccagcattcgtcccaataaacttaatggtgttggcagcaatcacattttccattccgtgtttaactattggctccacaatctccatcgctgtactcagcgtacttaaaaacgctgaggtcacctgcgcttgactcttagcatcccctttactctcttgtagctgattggaaaattccaaaacattggaagccaaaactaaccatttaatccgggatttctttaataccggctctccttcagcactgtcagcaaattttttaaaatcagactgatatttattactttttttcaaccgcgcctcaaacccggcttcttaagctgctccaacacctgctgtcgaaacgcattaccgtccttaagttgtgataccgacagttcaaccatctgatcaagcggcacacctgaaatcaccgataacagcgtttactcagcattcattcatgctattcaacactttcccctagcgagtaaattcag

SEQ ID NO: 4364 - DNA, 768 bp, Photorhabdus luminescens
  misc_feature (686)..(686): n is a, c, g, or t
atccggtagtggaaaaaattctggcggccactgagcagaaactccaagaattgatgggtaaccctatttcattacgtggattacaacctcaggacttcaccaccgagcaatttggtgttccaaccgttaccgatattttgaaagagctggaaaaacctggccgagatccacgcccagagtttaaaaccgcgactttcgcggaaggtgtagaaaccatgaatgatctgcatccgggaatggtgctggaaggtgcggtcactaacgtgactaactttggcgcatttgtcgatatcggcgttcatcaagatggtttagttcatatctcttcgctgtccaatcgctttgtagaagatcctcacaccgtagtaaaagcgggtgatatcgttaaagtaaaagtgttggaagttgatctgaaccgcaagcgcattgctctgaccatgcgtcttgatgagcaaccgggagaaacccactcacgccgcagtaacaataacaatccacaaactgaccgccgccctgaacaaaataacaggaaccgtaatacttccggttcttctacctcagccggaaacagtgcgatgagtgatgcactagctgctgcatttggaaaaaaacgttaagattcctatcactggtaacagatgcactgcttcggcagtgcacgtctcatagttcctgccagaaagatncaaactcacagattcatatcaactctgagtgactaagtgattaaattaacacccaaaatgaaaataggattaacattgaaat

SEQ ID NO: 4365 - DNA, 682 bp, Photorhabdus luminescens
  misc_feature (591)..(591): n is a, c, g, or t
  misc_feature (600)..(600): n is a, c, g, or t
  misc_feature (614)..(614): n is a, c, g, or t
  misc_feature (626)..(626): n is a, c, g, or t
tgatgcgtgatattgcctggggatttttttatggcactgttgcgtttgatgatgtactgggcacgactaatcattacggtaacgtcgatttgtacatggggtcattccataaagaatggacccgtgctggccgtgattataaagagaatttcaaatctgacgagctgatggcgattttcaaagccatgatttctgactggaccaacaccgggtttgatcccttcgctgcaccgcaggaaacgggagtggcgtggggacgcaaaaatggcaatgaagatcgtttaatcgggcgtaaacgtgaagtggctaaacgcatggtgggcattccgggtgatgcgccgctgcgttcagatgataatggtcatccggttaaccgggctttcatggatgtaaatcaggagcagcccgtcgtgaaagctgaaccaggctttgaaggtgaactgcatgcgttcaacctgtttggttatctctcccgttcggatatgacctggaatccgtcagtggtttccgtggtgcgtcagagtctgttttgcccgactaccgaagagtttattcttcctattgaccacggtaatgaccgtgccgaatggntcatccagntgtctgatgaaatngcctgggatatncaggatggcaagagcagcagcccactggcgaaagtcaccatgcgtgccggggattt

SEQ ID NO: 4366 - DNA, 758 bp, Photorhabdus luminescens
  misc_feature (658)..(658): n is a, c, g, or t
  misc_feature (692)..(692): n is a, c, g, or t
ctttttctttctgggagacaaaatcagtttcggtttttttaatccctgcatcagcaaattgctgtaccaagcgatcaaccgaagtctgtatctcttctgccagtgattttacggttacatctgtcatgctgttccttcctgctacggtttattacgcatcatcgccaaaccaacagatatttcgggcagccatgatgagctcgcctgttttctcatcattcaaaccttcaatatcagataggtcgtcgataccctgctcggcaagatcttccagcgtacagatgccacgggcagctaggtcaaatgccagagtacgattcataccagtcagatttaacaactcttcagttggttgtttatcactgaggctttctttctgagccagttccagagtagttaaagcagctttcgcacgttcacgcaggacttcgatagtttcctcatcaaggccttcaatttctagaagttccttaattggtacataggccaattcttccagagttgagaacccttcttcgactagaacagtagcaaattcttcatcaatatcgagatgcttagtgaatgtatcaatagaagcatgagcttctgcctgatgttttgcttgtaactcttcagcagtcatgacatttaattcccatttgtcatcaccacgatngtttttcaacaactgcgcagccaggcgcacattntgaccattacggccgatagcctgcgctaagttgttgctttcacgggcacatccatcgtacacttgt

SEQ ID NO: 4367 - DNA, 678 bp, Photorhabdus luminescens
  misc_feature (517)..(517): n is a, c, g, or t
  misc_feature (549)..(549): n is a, c, g, or t
  misc_feature (678)..(678): n is a, c, g, or t
aagtgttgttacgcaatgatcctatgttcaaacccgtactgacccgtaacggagactattttatttctgttgctggtcgttctgaggttgcacgtaaacatagcgcaaatatgctgatttctattcatgcggatgccgctcctaatcgtagtgcgcgtggtgcttctgtttgggtgctgtcaaacaagcgtgcaaacagtgaattgggtaattggcttgaacagcatgagaaacagtcggagttactgggtggtgcaggtaatgctctggcaaatggggctgatccttatctaagccaggcggtgctggatttgcaattcggccactcccaacgggtgggctataacgttgcagtacaggttttgagtgagttgcgcaaggtcggtttattacataaacgctcgccagaacatgccagcttaggtgtgttacgttcaccggatattccttcaattttggtggaaacaggatttatcagtaactcggcggaagaagcattactgggttctaatgattntcaggataagctagcaagtgctattcatcggngattgcgtaactattttctggcaaatccattgcaggctgcacctaaagcagccaagaagtaaaggttaaatatggctatcaagatcttacctcctcaattagcaaaccaaattgcggctggcgaagtcn

SEQ ID NO: 4368 - DNA, 747 bp, Photorhabdus luminescens
  misc_feature (747)..(747): n is a, c, g, or t
aagcttcctttttcgccccaatgttcgcacattgggattgataaatagcttgtttccctctttcaataaattaaattttgcattttcaaatatagcggaatttttctgctctaccttgacatcattccccaacgatttcagattaatgcctgaaatccgcggcactcttctgacacgctcacctgaactgttcgacgttggtatcaccctatcgtcagattgtcctttggcaaactttgaagtcgttaaaacgccggtattttccacgcgaatactggcatttatctgtagacgatcaaccgcttgtttagcatcatccaacgcttgtagctcttcttcggtcaatcctttgtagaattttttttcagcttccggtattaattcgggatcaatatagctaccggtttcccccgcgcctgtcgattcatagccattaccagacaaaccactaccaccggcaccggtacgatcaggttttgaatcgctctgttttgcccctctaacatcttcttgtacctgggcaattttattttcagccgcagcaatatcacgtttaccccgatattccgccccctgataggcgatatttgcatcattttccgccttttcggcccgttgttgttgcaataatgcttcttcttttcttaattctgcttttttctgagccgctgcaatatcttgttttgcactggcatgatgctgttcactttgtgctacgccgacctcggatttcttcaccgcttcttn

SEQ ID NO: 4369 - DNA, 695 bp, Photorhabdus luminescens
ataacgaattttttcgtgggcttgatattcgatctgctttaataaccgggtgatatcttggttaacaccgagtgtgttgagtgtcagcagtggggcgtctttctctacccgctgcccattctgaacatggatagcggccacccggctctgttcgtatgcctgaattatccgccaacgcccatatccccttatgcgaccgcctccgtcgtccccccttccccctcacctctcccttcctcctctcccttttccccaccacgcatcctcttcatcttctcccctccatcccatccccccgtcatcttccatctgtcccctccttcttgtccgccccttccacttctctccctcgcctcgttcctgtcaattcccttatcctttccccgtcattcccccatacgatttgccccctctatttcctctccttccccacctttccctcctctctttctcccgtgtcactccccgctgcccccacacatttcctttccctccccgctcgccccttccctttccctcccccttatcccccttcctatcccccttccttcctgttttccctcttccgctcctctcccactttacctcaattcgtccgttcttcacattccccgtctgctcctccctttcgcattccctatttccctccatgccttccccttctacgtttccgcatattcccaccagcccccccg

SEQ ID NO: 4370 - DNA, 755 bp, Photorhabdus luminescens
  misc_feature (624)..(624): n is a, c, g, or t
aagcttaatcgccgattcaacaacactgctaccagtcggtgaagtaaactgtagtttataggtcaaccctctgggtaccagaatgttttcttgaaaagcggtgataaagtcttttttcgctttagtgtgcaaatccaatgcaccttgaataccatcttcattgatgtactgagatacagccagttttagtgcgtaatggttatgcccataattcaacgcccctgcacaactgagaaaatcaagatatggcgagccatctgtttaagttctcctccaaatgttttctgaatgaggctaatgtaagtcagcctcgtagattagatttctgcgtttacagcaactaaaaactgtgaaatcaaataccaaaaaattaactatccgacgataattaaataatctgctcggatacaaatgctatgtcttctatcttttcactaagtcgttcggccaacgctaaagcgaatcccgtgccataacgtttttcatctgctgtcacatttattaaaataccttcgcctttcaaatcatttatcaactcaaccctaatcggtaagctggtatggtcacgcacatcttcatcactattcaccaacccttgctctaataactcattgcgagaatganaatgaacgtagctaaatgcagcctcgaagggtggccctcctaacatggtttgtatttctgaatatggaaagcgtctaaagggcaatatttctttttcagcatcgaaagactgtcttgccagtgcctgccag

SEQ ID NO: 4371 - DNA, 666 bp, Photorhabdus luminescens
acgaatcagtggcagatatttatgagcacgtttgtccaaatggtttggtaccagttgtatagtgacagaccaaatgacatgtaaaccggattggcgtttttgtaatttattggcaatcagataatctgcaaagtgtgttgctcgccattcccaacgaatcggttggccattattgtccataacttgtccataaaggaaaggttctttactgatctgaatatcgttagtatcagaataaagatcaactgaacctggatcatcacccattaataaggtcgtgataatggccttgcgtaaataggttgtagggtcaattggagaaattgtttcaattgtgatcgttccagcttcaaaattgatatggctgcgggtccggtattgatcggtatatttaacgtaatccttcgggcctgcaattaatacttcatgcaacccccaaatgttctcaatgttatgagcaaactggcccatcaaaatatcaaaaccattggtatcttttatatattcttcgcggtattcactatttttgttgctggtacaggaaataagaattggggcaataacaaacaacgctaacagttttttcatcttacattgccatctggtgttgatacaacatcagagccacgggctctgatgaaagctaaatattatttttctggtggg

SEQ ID NO: 4372 - DNA, 765 bp, Photorhabdus luminescens
aagctttgaccgaaagaagacagactttcaaagatactcacggtaatttcatgttggtacagtttgccggatacgattcaaaagagatagagcaattgtttcaagagcagggtattttaatcagacgtccgtttgaacagagtaatttaaaaggttggctgagagtaaccatttcacagcttgaacattgcgaaaaatttatttcggcacttgatatcgttgtagacaaattgaacttcaaaaaaatttgatgaagagggaatcatgacagagaaggccagagccgtagggatcaaccatgtgtctattgaagttggtaacattaatgaagcagtcgcattttatagtgcgcttatgcgcattaaacccgggctgttatcagagactgagggatcgattgaactgggtgatcagtttgttgcctttacttgcagccaaggagaacaagctcacaaacctggtcattttgggttcgttgttgatgataaagaaaaggttcgtgaggcattaaagcaattcgatattgaacctttgcctggccgattttttggttttctggatccttggggcaatcatatcgaagtggtcagctacgagaatattaaatttactaagtctcctggtgttctcaatggtatgggattagcagacttgaagaaaacgatcgtgcacaacgcgagcttcgagaacaaggttatagtgagcctttgtcttctttgaaccataagattgaagcaatgttttaccaaaagtttttgagaaaat

SEQ ID NO: 4373 - DNA, 687 bp, Photorhabdus luminescens
gatcccccggaaatgtcacctcaatcaacatttttaggttatcggggtgtacggagccatcaaagtaagtagcatttctacctggccaacggagaacttcgtctttaaccaaaataatatcgggccgacggatacgtttaacaccaaatttttctacatcgtcggcagaaggccgggcaaatgggttactggattgcggtaagttatcactataacgctgtttagaggccagactggtcgccagcatgggcagaggtacatctttaggccctcggatagcaaacaccacttctgctttatagggccacaggaagtcatgcttaagctcctcaaccttaatcaacccactcataatgacttgattaagaaagcgaatagcgcccagtttggtgataatcattgccggcaggcgcagagcgtattcggcttttctcgccagataacagggatcttcatcggcaggaaagacccctatttccatcgtacagttaattgaggtcacgggtcgggcacttcttgccgctgttggatatcggcatacctatttccttcataaattccatcacattactctaccggcggtgttatcacccgacttcgcataaggttttctttcggtttcggtgaaggcttccggcgaacttagctgcagattattttccgccttattttgacaagcaccgttcg

SEQ ID NO: 4374 - DNA, 773 bp, Photorhabdus luminescens
  misc_feature (529)..(529): n is a, c, g, or t
cattagctcatgcagcaattattccacccggtacacaactggcaaccaaccagaatattgttcgtcataatggctcagaacctgcttctcttgacgtgcataaagttgaaagtgatgttgagtttgatattataaacgacttttttagtggattaattagtataggaaatgatggtaagtttaatcctaatttagcgatccgttgggaaaccaacgataataaaacctgggtatttcatctaagagaaggaataaaatggtctgacggttcacctattaccgctcatgatgtggtttttagttggagacgtttaattgatccccaaatggcatccccgtatggcagttatattgaaaacatgtatatagtaaatgccaaagatattcttgctggtaagaaaaaagccaatgaattaggtgtaaaagcattggataatttaacggtagaagtaacattagagcaaccgctatcctattttttaaatatgctggcacacccagttatggttcctatcagccaaaaagcggntgagaagtatggtgaaaaatggactcaaccaaatgtgtttgtcagtagtggcccattcaaactctctgaatggatcgtcaatgagaaggtgattggcatcaggaatccacaatattgggataataaacacaccgtaattaataaagtcacctatcttaacgtcacatcagaaacagcggtggtaaaccgttatttagcaggagaaatagatattacaaagggtattccatcggttttatttaaa

SEQ ID NO: 4375 - DNA, 693 bp, Photorhabdus luminescens
gatacagagttgtgcaggtatcaatgatgtactgaaagtccggactgaaccaagagaattcgcagcatcaattcgcgttcctgttcgtccggcatatctgatttctttgccagattcagttccttatgattggatatccacactctgcttatcagggagagtcgggcaaatttatcaacaggcaacaacttataccgatgacgttgttagcgccataattaccggcaatagtgatgtacaacttactgaacgaattgaacattttgccgactggatcgatgatttagtcaggtggcaaaactgatgaaattccttttaaccctgtgttttgagagaagactataatgaaaatccttatagcaggttcaggtgccggcgcacaggcgctggcatggaaattattacaggacccagcagtagaaaaagtatggttagccccaggtaatccggctacgtcatgcgcacccggaatggaaaatattccagtgtcttcaggagatgttgaggggctggctagggctgctctggaactaaaagcagactttacgcttatcacaccgacccaaactttggcagctggggtagccgactactttaaatctcgtgggttaccaatcattgccccgactcgtgaagcctcccgacttgaatggtcgaaaggcttttccaaaaattcatgaaaaatatcaaata

SEQ ID NO: 4376 - DNA, 748 bp, Photorhabdus luminescens
  misc_feature (622)..(622): n is a, c, g, or t
  misc_feature (723)..(723): n is a, c, g, or t
tatgaccctaaatatacgtaaaagttgtatcaaattacgctgctagtagctctttagcgtttgccagggtattttttgtcacttcactgcccgcgagaagccgcgccagctcttgtaatctggcttttttatccagtagttgcatttgagtttcagtttcttcaccgtcagtctgtttactgacataaaaatgttggtgaccacaaccggctacttgaggcaggtgggtgacgcacataacctgtgtagattcgcctaattcacgtaacagacggccgacaattgcggctgttgggccgctgataccgacatccacttcatcgaaaatcaaagcggacgtttccattttcttagccgttataacctgaattgccagcgcaatacgggaaagttcaccacctgaagcaacttttgcgagagattggtgtggctgaccggggttagtggtgacgttaaattcaactttatctgaaccatcagcgttcagatgttcaggtgtaaaagagacatcaatggtaaagcgaccatgaggcatggcgagttgatgcatactgtgcgtaatgagttcactgagttctttagcatattgttggcgaaccagatgcaatctttctgcaacttncaatgcctgcttatggtgtttattaacctgctcgctaaggtgggtacagtcatcttcttgctgcgccagtaattgctgttcttccataattgttgatgtantgaaggaagttcttccggtggacgt

SEQ ID NO: 4377 - DNA, 666 bp, Photorhabdus luminescens
  misc_feature (505)..(505): n is a, c, g, or t
attggaaaagctaattccggtaggtgcaccacctctttagccgactgacatacaccaaatagtgggtgaaatgtaatggagcaatcttcgataaaactttatatccaaaattagcagcagtttaccccagtggcggatgaccgatataccctaaagatttcaagatgcatcgcgacggcaagggagtgaatccccgggagcatagataactatgtgaccggggtgagcgagtgcagccaacaaagaggcaacttgaaagataacgagtataggggtatcaaagccacataacctagcgtttaactatatgatgagggcagcataatgagcacgttggtacttgaagaaatcccggtaggaataccacttccttggccgactgacataccaccaaatgggtgggtgaaatgcaatggagcgatcttcgatcaaactttatatccacaattagcgcaagcttaccctactggcagattacccgatttacggggtgaatttatccggngctgggatgatgggcgtggggtgatattgggccatatctatatccgggcaactagcagatattgctccacatagtcacagggttgtccggatgtggtccaactaaatggcggaaccgacggggtaggtcagcgggccgtattctaatagtgtctccaaacc

SEQ ID NO: 4378 - DNA, 773 bp, Photorhabdus luminescens
aagcttgtggatatttttcggcgtggctttctactgtttcctgtacataggtcacggggatacctgtttcaagggcgtgcagtctggcaacctgaagtggttccgtacccatatccagcccggtcacatcagccccttcacgggccatactttctgacaaaataccgccaccacagcctacatccaacacttttttaccgaaaataccgccagaacgctgcaaaatataattcaggcgtagtgggttaatccggtgcagtggctgaaattcaccttccaaatcccaccagcgagaagcgatcgcttcaaatttttctatttcctgttgatcaacattgtttggggtggaaggggttttgatgttcatcagtggttattgctccttaaactttctttaaacaggcggattcactcagttctgccaaggttcattcagttctgagtcagttttgaatcagttttgaatcagttttgaaatagtatacacggcctaatttttaaatacccgtatctgatttttataaaactgttggggtgtggtatagttctaaacctttgaattccgaatgtatgaggaatagcgggctccatgagcgacattgccagagaaatccccccggtcatatcgaagaagagctgaaaagctcgtatttggattatgcgatgtcctgtattgttgggcgcgcactaccaaatgttcgagacggactaaacccggaacacccgaccgtgcttatgcactgagtgtactgggaaatgattggaataaaccc

SEQ ID NO: 4379 - DNA, 685 bp, Photorhabdus luminescens
gaatagtggtactcctctcccaaaaaagcaccaaccagaatcaaagcggttttacgaatacccgctgtctgtactttttcagcgatatccgccaaagtaccccgcacggttaagctttcatcccaagtcgctttgtagatcaccgcgaccggcgtcgttgccggataaccaccagcttgaagacgcgcagccacatgtctcattttctgtacagaaagataaatcgccattgacgtttgatgagcagcgaaggattccagttgttcgagcggcggcactggcgtgcgcccttcaatccgggtaatgatcaagctttgcgccacttccggtacggtgtactccacccctaattgcgctgccgccccaaggaaagcactgacacccggtatcgagacaaaactgatacccgcttcggtcaaaacttcgccttgttcgcgtatggaaccgtacaatgagagatcgccggtttgcagccgcaccaccagcttacccgcacgtacaccatcaaccatcattgcatcactctgttccaccgtcaggccggcgctggcatgacactcagcctccggcgggcaataatccagcagttccggcttaatcagtgaaccggcataaatcaccacctgcgcctgttgcaggcaacggtaacctttcaaggtgattagctctttgtcacccggtccgg

SEQ ID NO: 4380 - DNA, 764 bp, Photorhabdus luminescens
  misc_feature (539)..(539): n is a, c, g, or t
aagctttcccactaatggaaataatgaagaagcaggaaccaacgcctcacaaacaattgtcaggtgagtttcccaacctcgcgctaatgcttctgcatcagccgttaatttatcagcagcttcaagcaattgacgtccacgctcaagcagcatacgaccaacattggtgaatttagttctgtgacccgaacggtcaaacagcactacatccagctcctcttctaatttttgcatcgtatagctaagtgcagaaggaacacgaccaagctcatcagcggccgcagcaaaacttccccgccggtcaatcgcatccatgacccggagagattccagtgtaagcgctcgttctttgctcatatttttctcaatcaggaaatttgaatatgctgaccagattaactggctaacatttcgccgtccagataattactattgtttgtgtgtgtttttgtaaggtaaccgccattatgattataaatagaacagcaaaacaatgtgggaaagctgactatggttggctacaagctcgttatacattntcatttggtcactattttgacccaaagtttttaggttatggcgcgctacgtgtactcaatcaagaagtcattgcccccaaagccgctttcccacctaaatcctatccacatgtggatatatggaatattattctacaaggtgaagcagaataccgtgacagcgaaggcaactatatcagagcccgtaaggagaatgttactttttctacccgcaggcatagctac

SEQ ID NO: 4381 - DNA, 680 bp, Photorhabdus luminescens
  misc_feature (655)..(655): n is a, c, g, or t
ctatattggaaattaaccatcggcggatgccggcaattcgtgacgctgatggtgtattggcaattggatttaacgtcttatgtgaagatgcgcgtagtcagatggattacattgttttatcaaaacgttatcacacggttttgttataccaggttccagcgataatgccgggtaatgaaaatgctgctcgtcgtttcttggcattggttgatgaattttatgaacgccgggtaaaattgataattaatgcggcggtgccgatggagcagatttaccaaggggtgttgttggttttcgaataccagcgttgcttatcccgtttgcaagagatgcaaagtgaagagtatctcaaattacctcatttaccttaagtttgagttcgcttatctatttcagacggaaaactgattttaaatattcaaatgggggtcgatttttattttagacttctctataatcttgcgaccccacgttacagctatggttttttcccacaaacttgcatatagtgccagcataggctattcgaaggggtaggtttgctggacagagtcgtgtgaacctcggcaagtttctgaaccttgagtgttaccaacgtgtaacttattattgggtaagctttaatgaaaacttttacagctaagccagaaaccgnaaacgcgactggtatgttgttgacg

SEQ ID NO: 4382 - DNA, 776 bp, Photorhabdus luminescens
  misc_feature (776)..(776): n is a, c, g, or t
aagcttcacgcaaatcagaccaagccgcatttatgtattgaaacattgaccaaaatgtcatcaccgtagcaacataaagtaatatgaatccacccaattcgaattcaaaattagggcgccataataaagcaattaacgctgccatctgtgctgtcgtttttaccttacccatccaggaaacggcaacactactgcgtttgcctaattcagccatccattctctgagagaagagatgataatttcacgcgctatcatggttgctgcgggcagggttatccaccatgtatgatagtgttcggaaactaagactaatgcggccgcaaccatgattttgtccgcgacaggatcaagaaatgcgccaaagcgagttgtctgtttccaaaggcgagcgagaaaaccgtcaaaccagtctgtcgccgcagcgacaataaaaattatggcacaaaccatcggcgcccatgtgaatggcaaatagaatgccaggacaaaaaatgggatcagggcgatacgaaatagagtgagccatgttggtatatttaattgcatagtgcttcttaactatctggctatagtggaatttataagtatggtgcatcaatgtacttagtgtttcaatgcattataaattttttctgctaatgcataggaaatagtcggtacttttgcgatctcttcgacacttgcattacgtaaaggctgcaaacctcccatgtatttcagtaacatttgtcggcgttttggtccacgccttcatagattccatgtactggtgttn

SEQ ID NO: 4383 - DNA, 690 bp, Photorhabdus luminescens
  misc_feature (493)..(493): n is a, c, g, or t
aggctgaaattacccgggcatcttcctgctctcattgcaggaactgctgtgatggggatcatgaacttattcgatcaacatgttgctactattggttctgaatttagttatatattgaatgatggtacacaagggcaaggtatccctcccatcctaccgcaatttgttttaccgtggcatttacctgatatgggtgctcatcaggttgatataagttggtcaacggtttcagccctattacccgccgccttttcaatggcaatgttaggtgccattgagtcactgctttgtgccgtggttttggatggtatgaccggtaagaagcatcactcaaacagtgaattgattggtcaagggttgggaaatattgccgcaccattcttcggtggcattacagctaccgccgcaatcgcccgctcagccgccaatatcagagccggcgcaacatcaccggtttcagccattgttcactctctgctcgtgttattgactntactggcattggcccccatgctctcctatcttcctctggccgctatgtctgccttgttgcttatggtcgcctggaatatgagtgaaatacataaagttatcgatctgatccgccgtgcaccaagggatgacattattgtgctggtgctttgtatgtcgctcacggtgctgtttgatatggttatcgcaattacgaaa

SEQ ID NO: 4384 - DNA, 774 bp, Photorhabdus luminescens
  misc_feature (475)..(475): n is a, c, g, or t
aagcttcttttttctcaggtttgttttcctgttttttatctattgatgactgaggtcgctgtcctgacactgcggcaagccgttccaatgctgaagttgctgacttcatcttaacaggcatagccgattcaggcttttttgttggcgtttgctcttgctgtcgggataacacattccttgctttcagcaactgcgcggttgggcttgatgcaagcgcctgaggtatctggggttccgactgagaagctctatccaatggtgccggttcattaatatcattagcaggtggcacatctccctgagcactatgtttcggctgtgctgtaactgatggtataaccgcaggatgtaccaccggtgccgcaacctcttcaataactgttttcggatgaaatgccaaagctctgaacagagccatttcaacacccatcctgcgctccggtgcatacggcaagtccctacgaccaatcagcanagtttgataataaagttgccaatcttccggtgaaacagcttttgccactatcccgcaacggccttcaattgatgaagaatcgctctctggctgagaaggtaacaattggagcattgcaatacgatgcagcaatgcacgaatttctacgagcaaatcctcccaatcagccccccgtgaagcgacttgttccaccaatgccataacctgctgaccgtcagctcgaatcatcgcttcaatgattgataatggctgttcatcatctaacgttcctagcatcaagctgactatttcagttgtcc

SEQ ID NO: 4385 - DNA, 686 bp, Photorhabdus luminescens
taatgtgggctttgagtggtggtgaggactatgaattgtgttttactgtcccagagaggaatcgtggtgcgttggaaattgcgttggcgcataccggtgctggttttagctgtgttggacagattatggcggaatcagagggtattcgttattacagcaataataaagagattaaattagatctgaaagggttcgatcactttattaccgaggaagcacatggataaggcaaagcatcgtttacggatgagtaatccctggcatctattagcgacaggttttggtagtgggctgtcgcccgtggtgccggggacaatgggatcggcagcggctattccattctggttattactgggtcagtttccggaatggatttgctggttggttattattgttgggatggtttcggcataatgatttgtcagcgtacttttgatgatatgaaggttcatgaccatggtagtattgccttggatgaatttatcggtatgtggatcacattgatgggaatccctatggctacctggcttcgggttctgaccggttttatagttgttccttattctggatatgtgggaacccgtggccaattcgcctggtttgatcgctatgctcatggtgcgataagcatcatgtcggatgatgctatcgctgctggattttctttcgtgattgtcggatactgg

SEQ ID NO: 4386 - DNA, 773 bp, Photorhabdus luminescens
gaatggtattaccagaaaattggtaacagcaaatgcccgattgtcgatacctggtggcaaacagaaactggtggcttcatgatcacaccactaccaggcgcaaccgaactaaaagcaggttccgcaacgctacctttcttcggtgttcagcccgcattggttgataatcttggtgaacaactagaaggtgtttgtgaaggaaacctagttattaccgattcctggccaggacaagcacgctcactatttggcgatcatgaccgtttcgaacaaacctatttctctacctttaagggaatgtattttagtggtgatggcgcacgccgtgatgaagatggctactattggataactggtcgtgttgatgatgtgctgaatatttccggccaccgtctaggtactgctgaaattgaatcagctttggtctcccatcctaaaattgcagaagctgctgtcgtaggtaccccacataatattaaagggcaggcaatttatgcctatgtcaccttaaatcacggtgaagaaccctctccagaactctatacagaagtccgtaattgggtacgtaaagaaatcggcccgattgctacaccagatatcctacactggacagactccttaccaaaaacccgttcaggaaaaattatgcgtcgtatcctgcgcaaaatagcctccggcgataccaacaatctaggggacatttcaacactagcagatccaggagtagtagaaaaattgttagaagaaaaacaaacaatgagtatttcgtgaca

SEQ ID NO: 4387 - DNA, 693 bp, Photorhabdus luminescens
taccgctatcagccatcacttgtaataccgtcaatgataaacgaccaccggtaatttctggatataacgaaccggaaagtgtcattgtgtcgttacccggccccagaaattgccaagcaggccgtatcccgatacggctgttaaaagcatgccgccatgactgctgatgttgcatactctggtatggtgtggtcttcaacataaaaacaaataaacccagtgcagccatcataattagaattctcctctatcagagaatgaactgcgtaaacgcgcctgctgtttacgttcccgatcatccaattcgcgcctaaccgctgctgcaatatcctgcgcagattgccccggtgcaccatagatatttatatgatagaccggtgattcactgcgatactctaccatctgccgtttgtctgctttcttttcctgaatctgaggataagcatgaaccggtaagctctgaacatgcaatggtgcggttctggctgcggcagaaggtgccattacgctcaaagaaaatgccgcagcggcagcaagtttggcagtctgtcgtcggctaataacattgacagggccagtgacaatctctggtccatattcacccacaataccaaatcggccagcccgaataatgccccctttgtcatgcttgggcagaaccgaactacattaggactcacattattactggcg

SEQ ID NO: 4388 - DNA, 767 bp, Photorhabdus luminescens
  misc_feature (624)..(624): n is a, c, g, or t
  misc_feature (723)..(723): n is a, c, g, or t
caagctttctgcacccacaaattcaatctgttgaatggtgtggcaaacaaattcagctgcatccgacgttaaaacgggggatggggatacggtgatattgttacgcagcgcttcccgctgttgttgggcttgctgcaacaaggctttttgttgttgcgtgatagtttcttgatccgccgagctgacaggaattgccgcctgtgccagtgcggagattgtcagcagaataagcccagtcaggctgcggtgataaaacggtaattttcccatagatgataattaaaaatttgataatgatattattaaactattctaatgtggtattaatttcccgtctgagtgggcagtgtgaaatgtgatcaatgtctggatctttaatcctgacaatgggaaatcggatatattaaatgctgtaaagtggtgataagaatgaaggtaattttttatacatcaataccaattcttcaagttgcttaatggtattgcgtcccaaatccagcaggcgtgcgatatcctgctgactattctccagcgcatttgttgaccggtaagcgagtaacggtgtcagttttcaagcgtgatttgattgtttagcggtgtttttaaatagactggttgactaanagtttgaaaattttacgcgcttttatgattcaaggcacagatttaaatacaaagtgtttaaattttaaaaaagagatttattttatatttaggatatcnttttttacgctttttatcctgggttcattaaaatagggttcgca

SEQ ID NO: 4389 - DNA, 675 bp, Photorhabdus luminescens
  misc_feature (417)..(417): n is a, c, g, or t
aacggtaaactccaggcgaaaagcctgacattgacacaaggccccaaccagattgatttcaaacgcggaacccttgttcccatgacaggggaagattatggcccttgggaagcgattgataccgggttattagggggaatgtatgccaataaaatccgtctggtgagtaccgagccgggtaaggttgtcaatctgaccaacctgacggcaacccaaggcgacatcagtctgacggcggatggcaaggtgactctgggggatgtacaggccaaaacggatatcaccgttaacggtaaagacattgacatggtgaaaaaaagtcatatgcaagccggtcaacatctgatattgacaaccgatacattgcagagttggggacgaattcgtgccgacggtgatgtcactattaaagcgaanaccttgtctttagatgggggaaatatcaccgccgggaaccaggttctgctacagggaaagacaagtttacggtgcgtggcacggatatttcaggtcatgacattaccttgattgccaatagttataatacttctgtttcacctagtgacacgtcggaaagcacacaagtattacctattatttctgcggttatacgctgcgtattctgtctgaacagggaatatcgctttcagatacgctaattaaccgggcgaaaat

SEQ ID NO: 4390 - DNA, 735 bp, Photorhabdus luminescens
ttcaattaattcagggagtaatgccgtagtttcactatttcccgaatcggcaatggacaggatataacaaggtccgccgccattttggaaataaagttttagcgcatcactgctggttgtagaggtaactgtatttatagcgtaagtgtaatctgtgtttgtatcgtcggcgtcaagagcaatatcggcagtggctgtatcgcctgcaactttcccggaaggagaagggggaggcggtggcgttggcgttggtttagtcgatgtgatggcgattgacgtaatacaaccgacattaaacagattggtaaaatccagccagctactcacacgtatcgcttttagagttgcgctggcttttttaggctggaagcggccaataaaaacaggtattgcggtgttcccgtggctgatagagagcgataatgatgcatcttcttcaatataaacgccgggataggtcggtgttgttggcatgatgcctccaattattgagcggtattctgggtgaactgcaagataataaattcggtcggacgcactgccgccatgccgaatttgacgatcattttgccttgcttgatatcgtcatcagtcatggtgacctctttaccgatttgcacaaaataagcctgttcagctttgttacccatcaatccgacttgttgccagagggcatggagatagttataaatcgcccggcgcaccgcttaccaagtgggttggctattacgctca

SEQ ID NO: 4391 - DNA, 669 bp, Photorhabdus luminescens
tataaaagagagtgtaatgtgctacgacttccacgcaaaaatcacatctactcaggtaagtaagcaaacaaatttacctaatcccctgaatatattggttacctataccttaggagacagcgaaatcagccaaaaaattcaaggtgtccttcgtgttagccaagatgatccgccacagttttctataaaagacaactctcggactggcatagcaatagcagaaggcacccaaaatgttctccagagtataaatattctttttctgacggaacccggtgaacgaattatgcgtgaagactacggctgtggtctgaatgattacctgtttgccaatatcagtgatgaattgatgacagacattcaaacccatattgaagaacgggtattacgctatgaaccacgcgcagaaattacctcgattcaagtgaaccagagaacaaacttgcccagcactctacatgttcaggttacctatgcgttgagaggcagcgacatcaaccaacagattgaaggcgtccttgaagttaatgaaggccgggtacaggtgagcttatgaataaacaactggtgattgatggcgacaacctgctattacaaccattgttctggaaccggcaagtccacattctggcacccgcgaccattcaaggcagcggacaccccaatata

SEQ ID NO: 4392 - DNA, 764 bp, Photorhabdus luminescens
  misc_feature (651)..(651): n is a, c, g, or t
atgatagcgcattcaaaacagatccaacctccgctttcggcggtattattgctttcaaccgcgaacttgatattaaaactgcacaagccattatcgaccgtcaattcgtcgaggtaattattgccccctcagtaaataaagatgtcttacctgtgctggcaaccaagcaaaatatccgcgttctggtatgtggtgaatgggaggaccgggctgctggccttgattttaaacgagttaatggtggcttactggtacaagatcgcgatcttggtatggttgcagtaactaacctacgtgtggtttccaaacgtcatcccaccgaacaagaaatgaaagatgctctgttctgctggaaggtcgctaagtttgtcaaatctaatgccattgtttatgcaaaaaatgatatgaccattggtattggtgctggccaaatgagccgtgtctattccgcaaaaattgcggggattaaagcagccgatgaaggcttggaagtccaaggatgcgcaatggcgtctgacgcctttttcccatttcgtgacggcattgatgccgctgcggctgtcggcgtaagttgcattatccaacccggcggttcaatccgtgacgacgaagtaattaccgcggctgatgaacacggtattgctatgattntcaccggcatgcgccattttcgccactaatcaatagcaggagttaatctgatgaatattctaattgttggtagcggtggacgcgaacttgcgctggcatgaaagcagctcatc

SEQ ID NO: 4393 - DNA, 690 bp, Photorhabdus luminescens
tggcggcactgcttcctcagaatgaatacagtcgtattgttgcaacttccgtggaaggtgaagtattacattgtagaggtgagttggctgatgcattagcgcggatgcaacaaaccgagcagcttgcgcgtcgttttcatgttcatcactatgcgttgtgggcgctgttgcagcaaagtgagatcttattagctcagggatatttgcagacggcttatgaaacgcagaataaggcatttgaattgatccgtgaacagcatttggagcagttgccaatgcatgaatttttgttgcgtatccgttcacagcttttgtggtgctggtctcgtcttgatgaagccgaagaggcggcacgtcgtgggctggaagtgttgtctaacttccaacctcaacagcagttgcaatgtttaacccagttggctaaatgctctttgaccagaggggatattgataatgcccgccgttatctggcgcgttgtgaaaacctgctgagtaatgggcagtatcatagagattggcgtacgaatactgacaagctgcgagtcatcatctggcagagtatggacgacaaaagcgccgctattcggtggttggcacagactgagcggccagaaagcgtcagtaatcattttaatcagggccagtggcgcaatattgctcgtgctcagattctgcttgggttggatgatg

SEQ ID NO: 4394 - DNA, 767 bp, Photorhabdus luminescens
  misc_feature (687)..(687): n is a, c, g, or t
  misc_feature (724)..(724): n is a, c, g, or t
aagcttcacttacccctggggtatgaccatgattaagaaaggtatcagcatctgagtctcgactgtcccaacctgagcggaatagcaaccaaccacctacaggtaaaggtccatggacttcgcaccattgatcgacatgttcacgttcgagtaaaaaatctggggctgttacttgatcagatacatcaattacagcggcaggcgcaaccaagtgtctaggaggtacacttgagacatcgatagaatctttgcctgaccgccaatgaacaggggcatcaaaatgagtccctgtatgctcggacatctggatattattccaataaacttctttgcctttttcgtcataacggcttattttttccaacttaaaaggccaaggttgccctcgttcaggcggcaaacgaatcacaggtgtttccgttgacaacggcgctgtaaggtcaagtacctcaactttcccctgcatgaacttcgcatagattgaagatgtcatagtattaagatttccttattctcattatgggcttaatagacaggggttgaatattcagatgtcgaattcgacatcacctcgtcttcataagcaacctgaagcttacgggtcatcaaaccaggacgcccgtccccaatagactttcggtcaacactaatcacaggaacgatttcagcgagagtgccacaggtganaacttcatcagccaaatacaactcggtacgatcaatntctcttcgttcacattcaaccgaaagcttatccttcgctagta

SEQ ID NO: 4395 - DNA, 672 bp, Photorhabdus luminescens
  misc_feature (224)..(225): n is a, c, g, or t
accgggtgaaggtggtcatgtagattttgccgcgaatagtgaagaacaagatgcaatattggctgttttacggcgtaaatttgggcatgtttcagtagaaagaatcttgtccggtagtggattggtaaacctttatcaggccattgccattttggatcatcgtcagccggaagatttagaaccagaaaccgtgacgcaacgagcattggataaaagttgccaannttgccatcgtgctctgacactattttgtgaaattatggggcgatttggcggaaatttagcgttaaatatggggacttttggtggtgtgtatatcgctggtggtatagtgccgcggtttcttgatttctttaggcaatcgaactttcttcatggatttgaagataaagggcgctttaaaccgttagtacaacagattcctgtttatttgattactcatccacaaccaggattattaggttcaggtacctatttacggcaacagctttcacttattgattaaattacaaggtcagatatatacatttcaaaattaatgattgtgtatatctgactggaattttttaaatatcaatattgcaactgtatcttaatattgaaaatcatgaaaatccattttatttttgagtgtttatgattttatttatattaaatcttgggttaatatat

SEQ ID NO: 4396 - DNA, 752 bp, Photorhabdus luminescens
aagcttatattctgcaaaatgaagatcatcgtatcgtatttgttattccttggatggatgaattttccattatcggaaccaccgatgtggaatatcaaggtgatccaaaagaggcgaagattgacgatcaggagattaattatctgctgagagtttataacgaccacttcaagaaacaacttaaccgtgacgatatcgtctggacctattctggcgtacgtccactgtgtgatgatgaatccgactcacctcaggccattacgcgcgactatacccttgacatacatgatgaacagggcaaagcaccattactgtctgtgttcggcggtaaattaactacttaccgtaagctggcagaacacgcaaccgaaaagctcatgcaatactatcccacggccggaaaagcctggaccagaaatggtcagttaccggggggtaatttggaaggatgcgatcgtgatggttatgcccgtttattgcgtaaacgttacaactggttaccggaaggcgttgctgtacgttatgcgcgtacttacggcagcaacagcgaactcattctgcaaggtgctaataatctgaccgatctaggcgaatccttcggtcacggcctgtatgaaacagagcttcgttatctggtcgataatgaatgggtcgttgaactggatgacgcaatctggcgccgtaccaaattgggtatgtggctaaaagaagagcagaagcaacgcattgcagcatggttagcggagaatgct

SEQ ID NO: 4397 - DNA, 663 bp, Photorhabdus luminescens
  misc_feature (558)..(558): n is a, c, g, or t
  misc_feature (663)..(663): n is a, c, g, or t
tgatgcgtgatattgcctggggatttttttatggcactgttgcgtttgatgatgtactgggcacgactaatcattacggtaacgtcgatttgtacatggggtcattccataaagaatggacccgtgctggccgtgattataaagagaatttcaaatctgacgagctgatggcgattttcaaagccatgatttctgactggaccaacaccgggtttgatcccttcgctgcaccgcaggaaacgggagtggcgtggggacgcaaaaatggcaatgaagatcgtttaatcgggcgtaaacgtgaagtggctaaacgcatggtgggcattccgggtgatgcgccgctgcgttcagatgataatggtcatccggttaaccgggctttcatggatgtaaatcaggagcagcccgtcgtgaaagctgaaccaggctttgaaggtgaactgcatgcgttcaacctgtttggttatctctcccgttcggatatgacctggaatccgtcagtggtttccgtggtgcgtcagagtctgttttgcccgactaccgaagagtttattcttnctattgaccacggtaatgaccgtgccgaatggttcatccagttgtctgatgaaattgcctgggatatcaaggatggcaagagcagcagcccactgccgaaagtcn

SEQ ID NO: 4398 - DNA, 758 bp, Photorhabdus luminescens
  misc_feature (743)..(743): n is a, c, g, or t
aagcttctgcgttgccgcaagggcattactttcgcctgtttggtctgtgagttgaataacaccttgttgtgtcagtgaggcgcttggtacttttgttgtgattttttgttctaatgctctatttaattgggtaatgagtttagctatatctccatcatctaaaacatcattaccagattgggtcgcgataaaatcagcgataacagaggatatggttgatgactgacgtaataccttatttagcaaatgagtagtaatattttttggtggaaacccagtcatcaaaccctgatcttgttcatatctttcttggctaattacattagcattactactaatggaaaaggctttaaaatcattttttttactcatgttctctcctgtaattaaataatttgattttttaatcaatatattgaattattataaaagtcattccatacaatatatgtcaataatagtttagcttgaaaaaaatatgataaaatattcttatgacttagaggggtaactgtttttggataatgagaataaataaaatcccgaaattgtatgatcgggtaaatatctataccctatggatttcaagatgcatcgcgatggcaagggagtgaatccccgggagcataggtaactatgtgaccggggtgagtgagcgcagccaacaaagaggcaatttgaaagataacgggtataaatcatttatattcaacatctgaaaatatgctaatagccatattgtntttgtccaatgcgga

SEQ ID NO: 4399 - DNA, 673 bp, Photorhabdus luminescens
aagtttcgtcagccgctcctcacgggtagatttcggatcacttatcaccatgatcgcatccgagagctccgagggccaagatttcgccgccccagccaaaagtacgatgccacgcgtcatttcgggataatccgaggcaatcgtcttggcgatccaatggccataagcgtgccccaccacaattgccttacctccttccgccgcaactactgccgcaaaatcgtcggcaaagtcgtggaaagtcacattttccatcggaccagtcgaccccgagattccgcgtggttccggcagagcaacgcgatagccgcgcctcgccagtcgatctgcgagtggcgcgaattccgcggttccccgcccggttgaagcaatcaccacgagcagtggccccttccctcgcaccgaatattcgatcgatgccacgccattggtgacagttttctgctctgcttgcatggccgaagccggatgcgcgacggcaaacacgatggacaaaaagcctaatatcaagacgaactgtttcattttcctcccttacagggttaattgtgtgaagtgtttataccctatggatttcaagatgcatcgcgacggcaagggaacgagtgcagccaacaaagaggcaacttgaaagataacgggtatataacgtcaactaagataagcatcgcta

SEQ ID NO: 4400 - DNA, 768 bp, Photorhabdus luminescens
  misc_feature (643)..(643): n is a, c, g, or t
aagcttgggttatcgccggttgcgatcactgggttcacgcagaaaaacccgacgcagtgttaaaggcaattcatcatttccttaatactaatacggaattaatgtagaaaaccggttaattagcgataaaagtggctcacttatcttgagccacttaattatcatgaagttaattaggcaaatttccctttgccaatcgtgacatcggtccatgccgttgtaatagccactttcgcttgactctccagcccctcaataaaaccattatcaccgactgtcggagcaaaactactcattgcctggatcaaagaatccaccacattatctgacagtgcagtaaattcacgcttccctaatgcgttcttatcacctatctgagtcaccaatttggcacgattgccattaaagtaattatcaaatgtcaccgaacctactgactcaaacaccccctgagcatcgttgtcccgagtttggcgcttcaccgacaacaccagatcatatccgctgcgctgcaaccataggtttcgccagtcaacgttattaagcaatatcatgtcttctgcgctgatatcattgaccgatgtatcaatcacctctccgctaaccataaaactgtctgcccccgaaccaccgtggaagcggntctgatacccacccagcaccagcagatcctgaccatcaccgccattaaactcactgaacttcgaaatcgctgcggctatcagatgatcatcaccttctccaccgttaattaccgcatggtagccc

SEQ ID NO: 4401 - DNA, 681 bp, Photorhabdus luminescens
tgcggatgttacaaaaacaggcccaccagttgcgctggcaggccccggtctacctgtggcaggtgtgtcacagtacctggtctcaggaaggtcgtatcactcagaccgtcggctgcttttttcctgaacgctgtaccccggatatcgtggcgacacagttacaaacgttggttgacccgttgcgcgagcgcgggatgcagcaactgttggagaagacggcccacgattttctttgtcgtctgtccgcgaacttgaaacaacaggggattgcgcactggcaacaggtcctgacgccgtggttagcggagtatggtgatgtggtgtcgctgcggggtttgatgttcagtttgccgcttaaagcgcagacgactcgcctcccgcagatctggctgcccgacacggcatggcagggggtgttggagggcagtcgttgtttccacggtcggcgggtgggcatgctccacacacagaccgtttgtcgtggcctgatagtgctgggcttgttatggggggccggaatgatgctctcctttttcaccaaccgtgaccagctagctgtggtgcaagcggcggtcactgacctgaaagctcagccggagaattctgatgcccagttgatggccttaaaggcgctgcgtaacgaggtggaccggctgcaagaccgggctgaacacggtgtac

SEQ ID NO: 4402 - DNA, 789 bp, Photorhabdus luminescens
  misc_feature (558)..(558): n is a, c, g, or t
  misc_feature (587)..(587): n is a, c, g, or t
aagcttatgcgtgttcttggctatgaattgccatattctgtcacggttgaaattgagcagttcgtggcgaatgagcgcggtggttacaacatccacggtttgattctggttgagcgtgaaggccagaagaaaatggttattggtaataaaggcagtaaaatcaagaccattggtattgaagctcgtcaggatatggaaaggctgtttgatgcaaaaatccacttagaactgtgggttaaagttaaagcgggttgggctgatgatgagcgagcgttacgtagcttgggttacgtcgatgatttgaaataaggcatcctcctgtggacggttggcaacgtgtttttgttcttcatgggcgtccttacagtgaaactagtctgttactggatctgtttactgaaaatgaagggcggattagcgtgttggcaaaaggtgcgcgtggccgtcgttccaatttgaaaggctgcttgcagccctttaccccattgctggttcgttggagcgggcggggggcaattaaaacgctgcgtgatgcagatcctatctctctggcccttnctcttaccggcagtgtgttgtatagcggnttatatatcaatgaattgttgtcaagagtgcttgaacagggaacggcttatcccgccttattctttgattatctccaatgcttgcagattcttgctgccagtgaatatacaccggaatatgcattacggtcggtttgaactggcgttgctggcaaatcttggttatggcgttgatatctgcattgtgcgggcagtggtgaaa

SEQ ID NO: 4403 - DNA, 703 bp, Photorhabdus luminescens
  misc_feature (538)..(538): n is a, c, g, or t
  misc_feature (604)..(604): n is a, c, g, or t
ttcaccagtttgctacgttgagtgaattccttgggatcatgctgctgccaatgcgccaatgtttgttcaagctgcaatacatgctgttcatcgggctgctcaacggtacggttaaaagcctcacgcacggccaccagcgccttactaggcaaatcggtatttatcgaaccaagacgccttttagtcgaatcaataaaccgcttgttatccttcttcagtaagataagttctagttttttaagtacagaagaatgagatctagggttatttccccctaatccttgcagatcaatacctgaaatcgtcggcgcttttctgattaattctctggatttatttaaagttgatttcaccgcgccatcggatgatgtttcggtaaacattgacatgatcgaagcaccggtattttctgaacgcatccctttattaagctgtaaccgattgactgcttgttgcgcattattcaaagcagccaaatcttctgctgttaatgccagatcttcactgagccaaccgtcaggttcagcttttgatgcangatcgatatgactcttccatttctccacctcaatcggtatataagcgtttccagacaaaccgctgnccgctgccccagtgcgatccggtttagcattatcagcctgtttcacgctttttgcattcctctgcgcctgtatcgttttattttccgccgctgtactat

SEQ ID NO: 4404 - DNA, 775 bp, Photorhabdus luminescens
aagctttgatagacgtctatagtggaaaaattcccgggaataaaatgttctttaattctgatatacttaaatattatacaacagaaggagcacccgcatttttcaattcacaaacctttgccaatgaatttgttccacaaagtatagatgatttgaaatcagtactatttgaacatattttaaatgattggcgagatgttatttcccataaaataaccgttcctactttaattttttcaggtgaaaacagcgactggatagaaagccaacaatggatttcatctactgtaccaaaaggggaaattataatttatggtcgggaagagcatggagatcacttcttagcgcttaaagatccattaagattttcaaaggatctttctgctttcttttattaaaaaacaggagaaaagaatgtttaccggactaagtgcttttcctttaacaccgctgtatggcaacaaggtagatgagaagacatttatctcgcttattgaaaatcttgttgaagctggagtggattctatcggcgcactgggatcgacgggtagctacgcctatcttacattatcggagcgcgcgcatgtcgcccgactggctgttgaacatgcgaacagtataccggtgatggtcagcattggagcgctgcgtgtagcggatatactcagccttgctgaagatgctcaacacgcgggtgttagcgccgtaatgctggcacctgtttcttaccagcgtcccacaccggacgaggtgtattcgctctatgaagaagtca

SEQ ID NO: 4405 - DNA, 689 bp, Photorhabdus luminescens
cattcaaaaccaatttcccagatgggtcgttagctcagtcggtagagcagttgacttttaatcaattggtcgcaggttcgaatcctgcacgacccaccatcttagagtttcattcaaaaccaatttcccagatgggtcgttagctcagtcggtagcgcagttgacttttaatcaattggtcgcaggttcgagccgagcgaagcgagacaacagcgcgtaagcgctggcccgaagggcgaggccgtaggccgagtcatcctgcacgacccaccatcttagagcttcattcaaaaccaatttcccagataggtcgttagctcagtcggtagagcagttgacttttaatcaattggtcgcaggttcgagccgagcgaagcgagacaacagcgcgtaagcgctggcccgaagggcgaggccgtaggccgagtcatcctgcacgacccaccatcttagagcttcattcaaaaccaatttcccagataggtcgttagctcagtcggtagagtagttgacttttaatcaattggtcgcaggttcgagccgagcgaagcgagacaacagcgcgtaagcgctggcccgaagggcgaggccgtaggccgagtcatcctgcacgacccaccatcttagagtttcattcaaaaccaatttcccagatgggtcgttagctcagtcggtagcgcagttgactt

SEQ ID NO: 4406 - DNA, 789 bp, Photorhabdus luminescens
aagcttggtttatttgtgaattatccagactgggtttttgatccacagaagcggatattttactgactgggattacattgtcttcaatatttttcagtttcataggtacagtaatggaataaagtaaagagaggcgagggcgattaccaagagcctgccaaaaattacctaagctatttaaattttcctgttggggaataacccgggtataagcaccgggaataccggttaattggcgattgttaatcaatgctcttaaaacacgcgtcatgacttgtgccgcctgattatctggctggctgtccgggctggcgctgtcgttcgatggtttattcggctcccagtaagtcattaaataattgcagttaatatttacccatcccggtaataatgtattggttgccggattataacgtcttgattcggcagagcgtaattgtagatcttcatgtatttcataaagaaatacactgactgtcggttctgattgaatggaattaatttcgggtagatcaaaacgaatatcaatgttttgaccgggaatgtctaaatatttaattagaatatcatttaatgcttgattaatctcaataatcgcattgtcagaagcaattatagttgtcatattgactccaattctacttaatttttaaatacccagcggccagttttatttaattcaagtatcaccggacgttctatatatttattttcaatctgtccaatattgtcatttgctggcaatatggatgataataaggcgatatttctgatattcgctccgttaaa

SEQ ID NO: 4407 - DNA, 703 bp, Photorhabdus luminescens
  misc_feature (622)..(622): n is a, c, g, or t
atgctgaaaaaatccctttcgatcaagataaaaatcaattctgggatagtttttactttattcaggaaaatactcctgaagaattagaggatatttaccaacatgctaataaagcagatggccttttaccgccacatcaagcttttgtttttgcttttttaaagttattagaaacatccaaccgattattaaataccttcccggcccgacaccgcgatctttattaccgggaattactgggactaagccccagaaaagcccaagcggatagcgttgctttaggcattaccttaaatacagataacgcagaatatcttatccctaaaggaaccctgtttgatgccgggcaggatagcgtcggcaacccattacaatatacatcagaaacagatttactagcgaatcaaggggaactgaccgacctgcgttggtatcggaaagataaggatagctggcaatcgacaatacctcttagcctctcagataacattgcattacctgaaaatggtattcaactttttagcccgacagccaatgatgtggcagtgctatccggttatctgattaaatcatctttattttctatgcccgaaggagaacgccatatcacattgacgctggnaaacgattgggaagggtcagctgaacatctcaccgcttaaatcagtacaggagatcactggttatcggttgccggtaatcc

SEQ ID NO: 4408 - DNA, 774 bp, Photorhabdus luminescens
aagcttgaagttatagagatcaccgataccgccctgagaagcaggagtattcacgagaatacgagctgttttcattttatcgccaaaatacttgattcgtgcggcttgattgtcctgatcggtatacaagcaagaagtgtgaccaattccgcccatttcaaccaatttttctgccttttctacggcatcttcaaagctattaccacgatacatagcgagcagtggagacaatttttcgtgagcaaagggttctgcttcatcagttaagctcacttctccaatcaagatcttggtcttttcaggaacattaatgcctgccatttcggcaatttttgttgcagattgaccaacgatttccgcatttagactaccgtttttcagaatgatatcttgaacagctttcagttccttgccttgtaacagataaccgccatgagtaaagaaacgtttacgcacctgatcataaatttcatccaccaccataacggattgttctgaagcgcagatgacgccgttgtcaaggttttagacctcagaatagatgccacagcgcgttaatatcagctgattcatcaatgacaaccggggtgttaccggcaccgacgccgattgcgggcttaccagagctgtatgccgcttttacatacctgggcctccggttgccaggatgagattgatgtcttggtggtgcatcaatgcattggaaggtcaacggagggttataattccaccaatattcttttgggcaccccggaaccgaacggtagaccatca

SEQ ID NO: 4409 - DNA, 691 bp, Photorhabdus luminescens
aatatgggtacccttaccggcgcaccgaaagtacgcgcaatgcaacttatcgctcactatgaaagtgaacgccgtggtagttacggtggggctgtcggttatttcaccggcaaaggggatatggataattgtatcgttattcgctctgcttacgtggaagatggcatggcgacgattcaggttggcgcaggtatcgtactggattccgaacctttagccgaatccgaagagactcgtaacaaagcaagagccgtcattcgggcaattattgaggctcatcaggcagaggagactttctaatggcaaatattcttctgctcgacaatgtggattcattcacctataacctcgtcgatcaattacgtaatcatggtcatcaggttgttatctatcgcaatactgtggcaactgaaatgattatgcagcaattaagaatgctctcctctccgctattgatgctttcaccgggaccgggtaaaccatctgactcaggttgtatgcctcaattactccacaaattatcggcaaaatcccagtgatcggaatctgtcttgggcatcaagccattattgaagcttatggtggaaaaatttctgctgctgatgaaatcctacacgggcaagcttctctggcaaacacgataatcaagctatgtttcgtaatctggaaaacccgctacccgttgcccggt

SEQ ID NO: 4410 - DNA, 772 bp, Photorhabdus luminescens
aagctttaaaccgcatcacatcagagaaaatgggtatgacaccgtaagcgcccgccggaactctggccgccatatcttccagtaagctataagtatcaacgccaagacgctccgccaacagcttttcttccgcgcaaaatgcatccctaaaccaacgcatggttaagccagtaaagaaactaatcgactccgcctgaaccatgccgggaataacatgaggatttatccgtgtattcatatttgggtcagtgaccggttcaggcagattaacaacctgctgccaaaatgtgccaccaataacggcggtctgggcaggtttgaccacacctaaaccaagacagccgagctgtacatcaccaccgcccataatgaccggtgtgccaatattcagtccacattgaacagcggctttctccgtgacgtaacctaacaaggttcccgtctcttttaccggcgaaagaatatcagaacgcaatcctgccatttccagtagatcgggacgccaatcacggcttaccagatccagcatgcctgtcgtaccggcattggagggatcgactgccaactcaccactgagcatatttgccagccagtcgctgatcatgggtaagggcgtcgcctgatgatagatatccgggcgatgatgagctaaccataacagacgaagcattgcaccccacgctaatgtttgccctgaccaccgatccacatcatattgaaaagtgctgtcatacaacgcccttcattcactcactttttggctggaacgcga

SEQ ID NO: 4411 - DNA, 688 bp, Photorhabdus luminescens
  misc_feature (492)..(492): n is a, c, g, or t
  misc_feature (524)..(524): n is a, c, g, or t
aaccaaaaccagatactaagccgtcggcaccggcgcttaagtctaaaccagacattaagtcagagtcgaaacctgaagttaaaccgattgaaacagccccgcaagggcaggcttatatcgtacaactgggtgctttgaaaaatgccggaaaggtagatgaaatcgttgccagactgcgtttgtctggttatcaggtttatacggttccttcatctccggttcaggggcaattaacgaggatatatgtcggtccaaatgcgtctaagcaacaacttgactcggcattatcagaattgaaaagtttgactggattacaagggcaggtaaggagttacaggccgtaataaaagtgggtaatgcctatgtgacaaatctatgtgacaaataggacaactatcatgaagaagtaaatattaagtgactgcggcgatgataattattcaaattcgtcgtcttaattattttcagtgggataggaaatctgctacgcanacgttttcgttttctgttagaatgcacctganacggatgccgaggtgtctattttggaattaaaacatggtttggattgattacgctattatcgccattattggcttctcggcattagttagcctgattcgtgggtttattcgtgaggcattatcactggtcacctgggggtgtgctttctttgtagcaagccatt

SEQ ID NO: 4412 - DNA, 787 bp, Photorhabdus luminescens
  misc_feature (671)..(671): n is a, c, g, or t
aatcttagctctgtcaacagattccgttgggagggacggaacctttgtcggccattttccatcactcgtcttgatgggacattgccctggataaagagactcccctagtttggagaaagtggagagcgccaaaatatcttttgctttatcaattgagtaatgtgtatcttcggaataaaaaagtacgggtgtaagcgagttctcgttaccacctacgaactccccttgttcaagggagctgttcgcattcgaatcaacccagagaacttttgcagctagataatcacgcgcattgcgcagtgcatataaattcccctcagtgcttcccattgacaacacatagccccagtatgcctcgcccggagtggtgctatctctgccaggagcgttccaaagtttagcaaaataatccagtacggcacgctcaacaaactttgagttaagtctgaaattgcccgccataaacgggtcgccaacattatttaactgaacatctaagtacttgctaaattccgatgaatagtggagttcttggttggcttgatagccaagaatttttctcgcgttttctttacataccattctaactctgccagggcctgccctcgttcagcatctggtaataccgcgttcagatagttcaaacagagatgtcgtaattggccacatangttgcattattcatttttggctccaatgtcatgatctattaatgcaaaccggatgttaagcatgggttatatcttgagaggccctcctttattgtggtcttgtgttgagcctcatt

SEQ ID NO: 4413 - DNA, 685 bp, Photorhabdus luminescens
aatctgtatttacgtctccagattggccaacattaaccactatcaaaaacttcagtaagatcgccgataaccgcaaattctatcaggaaatcaatgctgagacggcggatgggcgcaatctatttaaacactacagtgagcaaactttccaacttgccagtggtgcaacctatcctacgacttatactttgtccgaagcggatttctctactgatccggataaaaactacctacaggtttgtttgaacgttgtttgggatcattatgaccgaccatcagggagaaaaggggcctattcctgggtcagcaagtggtttaacgtgtatgttgagttgcaagatagcaaagctccggatgccattcctcgattgatttcccgttacgatagcaagcgtggtctggtgcaatatttagacttctggacctcatcattacctgcgaaaactcgtcttaacaccacctttgtgcgtactttgattgagaaggctaatctgggtttggatagtttgctggattacaccttgcaagcagatccttctttggaggccgatctggtcactgacggaaaagtgagcccatggactttgatggttcaacggcctctatttctggagttatctttcactgcccgtcttattgctaccgctttgccaccacagaattttcgcggtcaaagagttggttc

SEQ ID NO: 4414 - DNA, 777 bp, Photorhabdus luminescens
  misc_feature (642)..(642): n is a, c, g, or t
  misc_feature (666)..(666): n is a, c, g, or t
  misc_feature (669)..(669): n is a, c, g, or t
aagcttgcatcctgatatcaatctgtccgtcgagtacgggtgagtcagcagtactttgcatatacagctcaaactcctgcaccagaaactgacctatccgcctggaggtggctagcgcatccggtgacgccatttttaccaacgtatgggccacttcggaatcaaaacgacgaccaaataagttgtcaatatattgggtagttgacttttctctgtgagcatcagcctgtaatgacagtaccaaaccatgtaactcagggtatgcctgtaactgactggcagcatcatcaaataacttgatagtttccttcgaggtgacttgtccggtgagccagagtcccctggcccgtccaatcaaaaacctcgcttccgggatattcgcggtttccaatcggctcataaaagcaatcagactttcactttcggtcttaggcgcttcccgttcagcggttgaattcgttcgggtcaacggggtaatctgccattcaataagacgattaatttcgttttgtgttataccgccttttaaaccgacaacacgtccggttccatcaaagatgacgcgttgcgtaagatgttcagcatgttgaggtgccacggcgaatccaaggacgccagcggattcagctcgctgagcctgtnagtgctctatcattcggcccattntanaacgtactaagttcacctgattggtgccgagagcaaactcctttgggctatgctgttgccaatcagctatcgcccgttaagcagcaatatatgctcttatcgaaaggc

SEQ ID NO: 4415 - DNA, 694 bp, Photorhabdus luminescens
ataacgaattttttcgtgggcttgatattcgatctgctttaataaccgggtgatatcttggttaacaccgagtgtgttgagtgtcagcagtggggcgtctttctctacccgctgcccattctgaacatggatagcggtcacccggctctgttcgtatgcctgaattatctgagaacggccagagacaatcaggcgaccggttgcggttgcctgaacatccaacttacccagataggcccagagcaaggccatgataatgccgatactgagcgtgattgcagtgtagcgggcaaaaggtgacggtggtcgttgtgacaatgctaaatgtgtcggtaaaaagtcatagtgctgcggacaagggcgcaaccaggttttaattttattcttaaacgctttaatcatgacaaggcatctcctgttttaattcttgttggaactgccagagcttccggtactgtctaccgtggttaagtagctggtcatgagagccttgttcgagaatttccccctgtttaagaacaatgatgcgatcacaatgacgtacagttgaaaggcggtgtgcgatggtgataaccgttctgccttgggcaatttctgccatatttgattgaatgcgtgattgtgactcgtcatcaagcgcactggttgcttcatcaagaatgaggattttggggtcagcgaggagagtccggga

SEQ ID NO: 4416 - DNA, 764 bp, Photorhabdus luminescens
  misc_feature (476)..(476): n is a, c, g, or t
aagcttctttagggttagcatgtgcctcattcggtgcgccattaatggcccatgggtataataatgttgttgaaaatggatattatctactgtacagagaaaatattaatggtggtgtcagagaaggatataggtatgttgctaataaaattggtttaagtgataaagatgcagatattacttatgcaactgttgatttagtgctttcaggttatggcatttttagaaaagttttgaagccaagagagaaatcttggagtttatttagaaatattaatagtgattttatcagaggatggagagaaatgggagttgtgagcttaactacagaaggtattgttgatgtttctacagttttgagtatttatcagctagaaaaggaaaaataatgatggattatattgatgttacaatttccactcaatctacttggcaggatatttttctgtactattctttatcattgattgttttgntttttcttttttttatgaaaattttcatagaaaaaaaaagaagttatatactctctgtttttggtttctttataatagtaatgtttggttcaattcaattgtttattgttaaatatgatggttatcatgaaattatatcaatgtttattaatttaaatagtgaagtaattagagtgggtagtgtgatattttctgctttatatgcgtgcatgttaccaagacaatatggggattaattaaaaattaaatggttgtaaaattaacttatcaatgggtagagtaagttca

SEQ ID NO: 4417 - DNA, 674 bp, Photorhabdus luminescens
cgggatatctgacactcccctcagagaaacaggctgatttgcaaacttacctccaggcaaatacgccaaaaccaatgcggccgggtcaggttaactattggggtaactacccaaaattctttatcagtctgatgaagagtttctacggagataatgcccgtaaagataacgactggggttttgactggctgccgaaatgggacaaaggttatgacgttctgcaattttttgacatgatgtcgaaaggtgaagtgaatggctatatttgtcagggctttaacccggtagcctcttttccgaataaaaacaaagtcgttggtgccctgtcgaaactgaaattcctgatcacgatcgatccgcttaatactgaaacttcaactttctggcagaaccacggtgaatttaatgaagtcgattcatccaaaattcagacagaagttttccgcctgccatgttgctgttttgcagaggaaaatggctcaattgttaactctggccgctggttgcaatggcactggaaaggggctgatgcaccgggagaagccatcggtgatggcaaaatcctttcaagaatcttcaacgtctgcgggatatgtaccgcacggaagggggtgcatcaccagagccgatgctgagcatgacttgggattacctcaacccggacaacccacata

SEQ ID NO: 4418 - DNA, 749 bp, Photorhabdus luminescens
  misc_feature (749)..(749): n is a, c, g, or t
ttccatctctgttgctaaatcatattcagaatcacgggtcattttcattgaataggcgttcagtgaatcataatcgaaaaagcctttgaaaatttcatcaagacaataacgcataatattgtctagcaggatcattgacttgcggcggtgtggcatttcgggcggcaagttaacaaaacgtggcaccttatctgacggaatttctaatagtgcatattgaatattctggctgtggacaatttcaactgccagataagtgtagtcatcttttagaaattcaaccaggttggtttctggattgatcagaattggtgtaatgtgtggccgcagatgttgacgaaaatattggcgtaaccagatttgttgattgggtgaaatttgtcgttcattgatgagaaaaatttgattgcgagcaatttctaataacagttcattatagagcacatcaaattcttgatcggttttagccactttagcttgaatttttttcaatacatttcgggcgctggtggctgatcctcgttcttcattaattaatattcgtcgttttacatcagcaaaacggactttgtaaaattcatccagattattggagtaaataccaaggaaccgcatccgttctattagtggattgctcttatccgccgcttcttgaagcacacgttcgttgaatgataaccaactaagttctttatcggtatagagcctgtcttgggacattgttactccaggtgttgaggtaaaagtan

SEQ ID NO: 4419 - DNA, 667 bp, Photorhabdus luminescens
  misc_feature (582)..(582): n is a, c, g, or t
  misc_feature (667)..(667): n is a, c, g, or t
agtcccgtttgatagcagcctcggctaactcacggcgcagcggttctgacacttcagcccagtgcggaatgcgaatgcggcgcaggtactgagcttggaagcgtaggaatccaccccgcattttcgttgaataggtcgccacaaacagacgagtgaccgcggatagcaggacagcctgcaaggcccgtaaatcccagtcgtctgacgtgacgtagtagaggttgtggtgaggatacagttcaccattttcatagacgatatgcgcctgtcccttgatatctggaatcaggagctttggcctcgcagccaacgacggcgtgatgcggtcaattgtgcgataccagttggccggagctttctgcgcacagtgacgcccagcgatcacctctcgtcgagcctcaaggtagcgccgcagacggggatactcgtcaagatcgaccagtccgccctgctcagcaaaggggttgataacacccagaccgcgccactccacttcgccggtcatgatgtctttggttgttaccagcggcaccttccggtctggctcaacattaagcgcgtcgaaatccccgataaatgctntgtccgcgccagtcgcaacaccgatcccgaccttacaccctgcctcttccagcaggggaaagtccccctccagacggcgaataan

SEQ ID NO: 4420 - DNA, 756 bp, Photorhabdus luminescens
  misc_feature (626)..(626): n is a, c, g, or t
  misc_feature (640)..(640): n is a, c, g, or t
  misc_feature (739)..(739): n is a, c, g, or t
  misc_feature (743)..(743): n is a, c, g, or t
  misc_feature (747)..(747): n is a, c, g, or t
aagctttcattacacgatgctttaataatttaataatttaataatttaataaatagctggtaagccattgacgccgggaaaaacttattttacacggtacgagcatttttactttagtcacaactgaaagaaaatctggacagagaaaacttacaggattcaatctgacagatatctgtataaacaatcagtcactgtcagattaaatttgggatatataccacgttgataaggaatggaggtttttctcacctaacctataccatcagtttggcagactaagccatcatcgccctgtcttccatagcctgacgccatcctcctaaccaatgagaacgggcatctaatgaataatagggacaatgctcccttggacgccccaaaatacctgcatggtaccctctcgataatgctcgtgctaaacgatctcgtttctgtctcttcatgcttttatttacctcataagctagatcagtagaaagaaaacagtggtcatcatttatccaaccacaatttagaaatacccctataaattttgaaaatcaagtcaagaaattcatattaatgtaatattttgttatatcagtacaaaaaaaacgataacgtattaataataaagaaaaatntttatcctactgantataccaattttctccgagcgcaaaagttttacactcggagaatgacagagggttatgattgggaaataattgactgcaatagcttgcacaactgactncatncttntgccatgtg

SEQ ID NO: 4421 - DNA, 675 bp, Photorhabdus luminescens
  misc_feature (675)..(675): n is a, c, g, or t
tcggcagccagtgctcaaatgaaataaattcttcgacacgcgcgttttcaggtagatctttactcagtgtttctaccgatctgccaccggtggttgccaatatacgtaccggtaatgtagccagtgcacgcaatgtggggaaaatcaactgatttaaatcggcattggaaatagtaccctgagtaactataaccaatggacgtggatcatcttcttcccataattgaggtgatgttgttgtcggtacagggttgggaagtggtccaataaaatggactgtatcaggcaatccttctcgtggatattcaaatgccagagttgagagttgcaaaaagcgatcagcaccaaagatgacttcatcgttgaaaagtctggttaatgcggagcctcctgactggactaatgaattattgaagctatcctgcacttcggctatgagttgttggtcggctttatcgacgagctgttcatgtgttaattcaggtggtaataccgcaggtgggatacgtggtccccagaaaatggaatctttcgaagagtaagccagaggtgttatgccaatgactatgactggaagaacgatgggtttttcttcttgcaacagaggtaatatgccataaaagcaattttcggctatcagtaatttcgcttgttgttcacgaataatttgtcgcn

SEQ ID NO: 4422 - DNA, 779 bp, Photorhabdus luminescens
agcttctgctttggtattaactgcttacttgattcgttgtaaaccgggagaaccaatgccagaagcaaccatgaaagctatcgaatatgcgaaaaagcatagtgtacctgtggttctgacgctagggacgaaatatgttattgctgatgatccacaatggtggcgtgattttctggttgagaatatttctgttctggcaatgaatgaagatgaagcttatgagcttacgggtttcagtgatccactattggcttcggatgtggcactagattgggtcgatttagttttgtgtaccgcaggtccggctggattatatatggcaggttatacggaaaaagattatatgcgtcagacaacccatccattgttaccgggtgctattgctgagtttaaccgttatgagtttagccgtgctatgcgtaaatctgattgccaaattccgatgaaagtttattcccatattgaaccttatatggggggaccagaaaaaatcatgaatactaatggggcaggtgatggtgctttatctgctttgctgcatgatataacggccaacaatcaccacagaatgaatgtgcctaattccagtaaacatatgcgtacttatctaacatattcatcgcttgctcaggtatgtaaatatgccaacagagttagctatcaggtattgagtcagcattccccacgattaagccgtggtttacccgaaaaagaagatagtttggaagaatcttactgggaacggtaattttaaaatttcggcaccgtataaattaata

SEQ ID NO: 4423 - DNA, 692 bp, Photorhabdus luminescens
gtatcccgtttatcgggatgcgccggctccgatgagtcgtaaacggattgaacacccgctttcactcggtgtacgcgctattgatggcttactcacttgtggcgaaggtcaacgtatggggatttttgccgcagcgggtggcggaaaaagtaccctgctatctacgctgattcgtagcgccgaagttgatgttaccgtgctggcgctcatcggtgaacgtggccgtgaagtacgggaatttatcgaatcagatctcggtgaagagggactaaaacgttccgtgctggtggtagcgacctcagatcgcccggcaatggagcgagctaaagcagggtttgtcgccacatcaatcgctgaatattttcgtgatcaaggcaaacgtgtactcctactgatggattcagtgacccgttttgcccgagcgcaacgagaaataggtttagctgccggcgagccgccaacccgacgaggttatcccccatcagtgtttgccgctttgccacggctaatggaacgtgctggtcaatccgacaaaggttcgattaccgccctctataccgtcttggtggaaggcgatgacatgacagagcctgtggcagacgagactcgttctatccttgatggtcacattattttgtcacgcaaactggcggcggctaaccactatccagctatcgatgtgttacgttccg

SEQ ID NO: 4424 - DNA, 761 bp, Photorhabdus luminescens
  misc_feature (659)..(659): n is a, c, g, or t
accaaaaccagatactaagccgtcggcaccggcgcttaagtctaaaccagacattaagtcagagtcgaaacctgaagttaaaccgattgaaacagccccgcaagggcaggcttatatcgtacaactgggtgctttgaaaaatgccggaaaggtagatgaaatcgttgccagactgcgtttgtctggttatcaggtttatacggttccttcatctccggttcaggggcaattaacgaggatatatgtcggtccaaatgcgtctaagcaacaacttgactcggcattatcagaattgaaaagtttgactggattacaagggcaggtaaggagttacaggccgtaataaaagtgggtaatgcctatgtgacaaatctatgtgacaaataggacaactatcatgaagaagtaaatattaagtgactgcggcgatgataattattcaaattcgtcgtcttaattattttcagtgggataggaaatctgctacgcaaacgttttcgttttctgttagaatgcacctgaaacggatgccgaggtgtctattttggaattaaaacatggtttggattgattacgctattatcgccattattggcttctcggcattagttagcctgattcgtgggtttattcgtgaggcattatcactggtcacctgngggtgtgctttctttgtagcaagccatttctatacttacttagcggtctatttcacccgttttgaagatgaattggtgcgtaacgggatcgctattgcgttg

SEQ ID NO: 4425 - DNA, 683 bp, Photorhabdus luminescens
  misc_feature (628)..(628): n is a, c, g, or t
taaaccgcatcacatcagagaaaatgggtatgacaccgtaagcgcccgccggaactctggccgccatatcttccagtaagctataagtatcaacgccaagacgctccgccaacagcttttcttccgcgcaaaatgcatccctaaaccaacgcatggttaagccagtaaagaaactaatcgactccgcctgaaccatgccgggaataacatgaggatttatccgtgtattcatatttgggtcagtgaccggttcaggcagattaacaacctgctgccaaaatgtgccaccaataacggcggtctgggcaggtttgaccacacctaaaccaagacagccgagctgtacatcaccaccgcccataatgaccggtgtgccaatattcagtccacattgaacagcggctttctccgtgacgtaacctaacaaggttcccgtctcttttaccggcgaaagaatatcagaacgcaatcctgccatttccagtagatcgggacgccaatcacggcttaccagatccagcatgcctgtcgtaccggcattggagggatcgactgccaactcaccactgagcatatttgccagccagtcgctgatcatggttaaggccgtcgcctgatgatagatatncgggcgatgatgagctaaccataacagacgaggcattgcacccaacgctaatgtt

SEQ ID NO: 4426 - DNA, 778 bp, Photorhabdus luminescens
aagcttggtcgcttggtttacgtgatagtcacttgcttatccagatagacatcttgaaccgcattaatcagctcaataccctctttcatggattttttgaaagccttacggccgaggattaaccccataccgcctgcgcgtttattaatgacggcggtacgaacggagtcacttaaatcattattaccggatgcaccacctgagttaatcataccggcgcgacccatgtagcagttagctatctgataacggaccagatcgataggatgatcggtagttaaatcagtgtaaacacgtttatcggtatgaccaaagccaatcgccgtatagccgccgttattttcggccattttttgtttaacgatatcggcaccgatagtggctgctaaatggttagcctggcctgtgaggtctgcactggcgtgataatctaccccctctttcttgaaggcagaattacgcaggtaggcccacaatactgttaccatgcccaattcatgcgcccgtttaaaggcggctgaaatttccttaaattgacgccgcgattcattagagccaaagtaaatttggtgctccaacggggacagcacccatctcgaatgctttgttcaacactagcatataaagtttgatcatattgggcgggatagcttaatgcttcattgtggctcagtgtaaccagaaatgggatcttatgagcataactacgagaaaccgcgttaacaccgcctagtagaggcacacatgttcaggcggtttcatagccaattaacatctt

SEQ ID NO: 4427 - DNA, 701 bp, Photorhabdus luminescens
gatttttcttacaaactcaataatgggatagaaaaatatattttacgcgaagcattcagaggaaaaatacccgaatatatcattgacagaccaaaaataagaatgccagatggcagtggtgtaaaaaatactatcattgattacgttaaagatattaaatgcaatctaccgagaaacatggttgacagccttaattctatcggattaacccatcaaagttcattatatttcgctgaaaagtatctctctttgggttatccactaccgaaagaacgttttaaagaatctggcaaagatttttcagaatcgggttactttaatttcatatcgtaatttaaccattatacccgtcatctttcaagttgcctctttgttggctgcactctctcaccccggtcacatagttctctatgcgcacggggattcgctccttttgccgcgcgaagcatcttgaaatccatagggtatattctgttaacaatgcagctatttagcgataaaaacaggattttttattctcatcaccttagcggcaaatttaaacctcacttcctttttttcaagaaaatcttaatcaataattgtcaactctcttaattcttcgatacaattatttcttttttattcaaactcttaatagctttatttaattgcctgactgaaacaacctaaacagatgcctaatcttccctttctttaag

SEQ ID NO: 4428 - DNA, 787 bp, Photorhabdus luminescens
aagcttaacgtcaaagataaagtcaaacaatattttgattatttacccgcgcatttctctgatattaccattgagcatcttattcatcacactagtgggttacgggatatatttttactttataatttggcaggtaaaaactcaagttttgactactgtcatgctgatttagtgagaaaattgatccaacgacaacagacatttaacgctcctattggggagtattatatttatagcaacacgggctattatttgctaggggaaatcgtcagcatagtttcaggtaagtcgtggaagaaatatgcagaagaaaatattttcgctccattagagatgaaagataccattatctgtgatgatataaccgagattatctctaatcgggcgatgggttacacttataatcaaaattcgcaacagtggataagaagtgatattaacaattctgtgatcggtagtgcagcggttcactccaccgtgaatgatttatgtcgttgggctagggcgttttattcgccatcaattgttcaggatctactgcctcaattatcccggaccccgaatttaaccaatggcaatcgcaacaattatgcttacggttttattatcgaacaacgtgaagggcaaaggattatacaacacagtggtacctatgccggctttcgagcgaatatttgtattctaccggatgctaaattaccgataccgatgacggctgccagcgatgttgatgttggtaaatggacggataatttatggatatcttgtttaacaaccatcttgcacc

SEQ ID NO: 4429 - DNA, 702 bp, Photorhabdus luminescens
  misc_feature (509)..(509): n is a, c, g, or t
  misc_feature (559)..(559): n is a, c, g, or t
atccggtagtggaaaaaattctggcggccactgagcagaaactccaagaattgatgggtaaccctatttcattacgtggattacaacctcaggacttcaccaccgagcaatttggtgttccaaccgttaccgatattttgaaagagctggaaaaacctggccgagatccacgcccagagtttaaaaccgcgactttcgcggaaggtgtagaaaccatgaatgatctgcatccgggaatggtgctggaaggtgcggtcactaacgtgactaactttggcgcatttgtcgatatcggcgttcatcaagatggtttagttcatatctcttcgctgtccaatcgctttgtagaagatcctcacaccgtagtaaaagcgggtgatatcgttaaagtaaaagtgttggaagttgatctgaaccgcaagcgcattgctctgaccatgcgtcttgatgagcaaccgggagaaacccactcacgccgcagtaacaataacattccacaaactgaccgncgccctgaacaaaataacaggaaccgtaatactttcggttcttttacctnagcccggaacagtgcgatgagtgatgcactaactgctgcatttggaaaaaaacgttagattcctatcactgtaaacagatgcactgcttcggcagtgcacgtctcatagttcctgccagaaatgattcaaactcacagattca

SEQ ID NO: 4430 - DNA, 769 bp, Photorhabdus luminescens
  misc_feature (596)..(596): n is a, c, g, or t
  misc_feature (617)..(617): n is a, c, g, or t
aagcttctatgttttaggaaagaaattcggtattaaaaccattcacctttttatttacccttttttagggcagaaacgcctatttttttaagtttaattatcatggttttcttcgtaaaataacagcgagaaaacgctttaatatgaactggagtacactcatggttttcaagtatgataaatttataaaacgaccattattaggcatatcaaatattatctaaaatatgaaaaataagtctgataataatgtcagtaatagtttttcaatctatcaaatcatacagcttattaactatttaactgaatatatttactcttataaaaaagttaaagataaagcatttgagacaaacggcaattttattcatctcaattatgtgggagtattgagtctttctgatttatgtaataagatattcataatagcaatagatcgatttactaaatgtaattttaccagagtgttagcgttcactagcatttgggattactaaccgtttacaaattctaaaacctataccctatggatttcgagatgcatcgcgacagcaagggagcgaatccccgggagcatagataacgatgtgaccggngtgagtgagtgcagccaacanagaggcaacttgaaagataacgggtatacatatccaagttacttggatatacggtttaaatctattttaagagtattcgaaatagtgccagatatttcgaattcgtgctgctctttttagttttggtatttactcaattaataactttggaa

SEQ ID NO: 4431 - DNA, 683 bp, Photorhabdus luminescens
  misc_feature (617)..(617): n is a, c, g, or t
  misc_feature (628)..(628): n is a, c, g, or t
aatcgccgattcaacaacactgctaccagtcggtgaagtaaactgtagtttataggtcaaccctctgggtaccagaatgttttcttgaaaagcggtgataaagtcttttttcgctttagtgtgcaaatccaatgcaccttgaataccatcttcattgatgtactgagatacagccagttttagtgcgtaatggttatgcccataattcaacgcccctgcacaactgagaaaatcaagatatggcgagccatctgtttaagttctcctccaaatgttttctgaatgaggctaatgtaagtcagcctcgtagattagatttctgcgtttacagcaactaaaaactgtgaaatcaaataccaaaaaattaactatccgacgataattaaataatctgctcggatacaaatgctatgtcttctatcttttcactaagtcgttcggccaacgctaaagcgaatcccgtgccataacgtttttcatctgctgtcacatttattaaaataccttcggctttcaaatcatttatcaactcaaccctaatcggtaagctggtatggtcacgcacatcttcatcactattcaccaacccttgctctaataactcattgcgagaatgnaatgaacgtanctaaatgcagcctcgaagggtggccctcctaacatggtttgtatttctgaatatg

SEQ ID NO: 4432 - DNA, 776 bp, Photorhabdus luminescens
  misc_feature (683)..(683): n is a, c, g, or t
  misc_feature (748)..(748): n is a, c, g, or t
aagctttacccgctcctcccgcagagggtatgccggggactattccgcagccgttgacaaaaaaactcccgctggtcagtacttctccctggtcttttttacccagctatgaagactgggttatcctcgggcaggaggtggctggcctaacagaacaagggttggattatatccgcgacagtacccgcgaactccttgctcaatttggagcatggttaaatcaagctgggaagtgggtgtgtgaagagattattgacccgataagccatcaggccagctatgcgttttcctgggtcagtgcacaaacgggaaaaatcgtgacctggacggagagtgagataaaagcccggtggcagactgtgcaacagggttcggacatcaccctggaagagctaaaaaacattagctggatgcagatattaaaagaggtgggtgaaggaatgctggaaatggtagtgattattgccggtgttgccattgttatccttgtcacccttgccgtcgctgccgcgctgattgcactggtggaaattttagccgctgctgctgcggtaagcgccgctgcattggccaccgtcttggcaatattggcgagtgtgacatttgccaccgcttcataattaacggagaaaatatggaaactgtagattactttgcccaactgagatcacaactgacctctnttctttttctcaatggcgatggactgactgtttcccgcctgggtctctcgataccctgtttttanacagggttatcccaggagaaaaacagcg

SEQ ID NO: 4433 - DNA, 685 bp, Photorhabdus luminescens
  misc_feature (674)..(674): n is a, c, g, or t
ttcgcctcctttatcacggcacgttgatatattccggtaaatacactttggaacgagcggaagaagcgctaactaaaggctgggcggatttgatcggatttggtcgcccttttattgctaacccagatttaccctatcgtcttgctaataagctagagctaaacccgccgataaaagaaaaatttttcggtggtaatatggaaggttataccgattatttggctataaactaatatacccgttatccttcaagttgcctctttgttggctacacccacttaccccggtcacatagttcggctatgctcccggggattctcgtcgcgatgcatcttgaaatcatctttataaagattaatttttgctttaacgaccaaagtatttacgggagtcattgacatattcactcagaaaatcgataaatgccctgattcgggtgcttacagcctgatcgctgtaatatacggcattgaaaggcattccgacgggtaaacgtttttaaccagtagttcaacaagttcaccactggtaatctccttatcaatcatataatcagacagacacgcgatacccattacccgtacacacagttgtttaggggttcaccactgttggaagaaagcccaccgttatttcatgcagttgtccgtcctgacagctatcggccagtattnagtgataccgg

SEQ ID NO: 4434 - DNA, 766 bp, Photorhabdus luminescens
  misc_feature (750)..(750): n is a, c, g, or t
agctatatcaacagatcccgttgggagggacggaacctttgtcggccattttccatcactcgtcttgatgggacattgccctggataaagagactcccctagtttggagaaagtggagagcgccaaaatatcttttgctttatcaattgagtaatgtgtatcttcggaataaaaaagtacgggtgtaagcgagttctcgttaccacctacgaactccccttgttcaagggagctgttcgcattcgaatcaacccagagaacttttgcagctagataatcacgcgcattgcgcagtgcatataaattcccctcagtgcttcccattgacaacacatagccccagtatgcctcgcccggagtggtgctatctctgccaggagcgttccaaagtttagcaaaataatccagtacggcacgctcaacaaactttgagttaagtctgaaattgcccgccataaacgggtcgccaacattatttaactgaacatctaagtacttgctaaattccgatgaatagtggagttcttggttggcttgatagccaagaaatttttctcgcgttttctttacatacgaatctaactctgccagggcctgccctcgttcagcatctgttaatccgtgttcagatagttcaaacagagattcgttaattgccacataagtttcattattcatatttggctccaatgtaatgatctattaaggcaaacggtatgttaagcatgggttatatcttgagagcgcctncttaattgttggcttg

SEQ ID NO: 4435 - DNA, 684 bp, Photorhabdus luminescens
tactggttcgaggacatagtaggaaagagttgaccttagattgtcagtttgctcgtcgtttgcaccaacaaagcatgtttgcttgtgcaggagcatagcccacctgcgattatcagaggtaatctggtaaagcccatcaaagcttgaatagttttgcagatttttgacaaagtgttggtcttttggtcagcactttggacggatagcggttaaccgtctgaccataatttgaaaaaatctgcggtgtacttctgccaattcgtcactgctgcttgaattctcacttttgataattaatagtaataaaagtgttgcaaaatatgatgaattacaagcatcaatcgacattatttctctaactttcagaatattcctatatatttttaagtgaaattcattgcactattgaacatttattaatccataaatggcaaaagcatgatgatgatttcagttagattcactcttcatgttgtaactcattggagaagtgaataaatggcaatagggtatttcctgctcgttggtgataaaacaacctgtggtggtcagattattactggtgaccacaccatgacatttaatgggcgagcaaccgctcgtgaaggggataaggttacctgtggcaaacatcccggtacttacgtgattgttggtggtgtatccgatgtgtttgacatggcg

SEQ ID NO: 4436 - DNA, 779 bp, Photorhabdus luminescens
  misc_feature (727)..(727): n is a, c, g, or t
aagcttatgttatgagtagtgggtttattgctattacattaatagctaaaatgaatacttatttgtgtaacaaacaggaaggaggtaataggataataaatagtaagtatcgttgtataaacgcattattttgacagaaaattaagtgtttgttacttatataccctatggatttcaggatgcatcgtggcggcaagggagtgaatccccgggagcatagcaaactatgtgaccggggtgagcgagagcagccaacaaagaagcaacttgaaagataacgggtataggcgtttaactttaatatgaggtttaatatgtcaatacttacaacagatatcgtttcaggaataacggttttagaagcgtgcccggttgtcattactgtgacttattcaggtgatgatacacataaagtaacggaaacgactgacataatgtacagtcacccaaaaaatacccgttttgataagacccctcgtattttaagagatgtcgagaataatacctgtactgcaaaatttgttgttactgctggttctgacgctggtgatttcatcataacattttcaatggataaggctacggaccccgatgctgaattggggattgcatttcattctattgataaaaatgatttttcacatgcagcgtttgaacctatcattattggcgattcgttgataaaagacttatctccggtagctgatgatgaacgaccttctgaatntaatggcagcttgcttattaatatctatgcgttgagtaaacaaatgagccgt

SEQ ID NO: 4437 - DNA, 695 bp, Photorhabdus luminescens
ggaagaggctaacgaaggcaaactcacattgaaaactcataagaggaggttaaaaaatgatatcttcatcagtccggatgagttgaaatctatccggagtaaactgaatatttctcaggctgtttttgcccagtacctgcataccggtgagacgacataccaaaactgggaacagggacgggctaaaccgaataaacaagctgtgttactgattaaaatggtggagcgcaacccgcaggcactagaatttcttgccagcctcacataacaatatcactttaattcatgtagctgagcattcacttttaacaatttcacgcaatgtaaatgggtgaaacttgacggtgatctcaccatcagtgatagctaaggtcggattaggcaaccgctcttgttcccctttgggttgactctctttaacagaaaaacctgccggcaaaggttgcggtaataatgcttttgcggctgttgataagatctcaggtgccaccggcagcaccagctccacatgttcccatccctgatgcaagtaagttttcttgccaggatagggcaattctacacaatcaatttgccaattaagcaccgcaattgggtactctaaatcaaacaagcagattggacgtccattaatgatagtttctgacatcaaactgccacattgcaaaaaacctttacgccagcgctccgctaca

SEQ ID NO: 4438 - DNA, 772 bp, Photorhabdus luminescens
aagctttccgggctcaccagacgccgtatcaccgcttctttgtattctgacgtctctttgcccatcagtttcaatgccgcagatagccgaaaccacatgcttggttcaacctgcgccatgatccgtttttccaatcctacttgactgtctgaccaccattctttgcaggtcggatatcccccctgtcccgtattagcaaaaccatcatcacggtgcggtttccagggaaaatccgaacgaggcgtttttgactgaagtacatcataataacccgcactattcagaaacgtttttgaccctaaccattcaatatcccgtaataccacttcatccagggttcttccctcgtcccggcgtttccactgatacaatgccagcgcataacagccatgggtgaaatcctgtaatatctgagccagtgccggattattaatccgcgtatgctggacctcaaaacgcagttgcctcaagtcgggactgcagggaagagaagctattgcagcctgagtgacccctttggaaatctgatgaaccagtatccaccaaaccggagccgccgccgttttaccgtcaagcgacgatatcacggacgcataacccgtttcagccggtttcggtgtccaagtaccacaactttttgcccgcgagtcatcatacgtaatggtactcagactcacattgaccaacggcacacagcaagcaatcatgaccagaaaagcgccatacaaagtgttttcaatccgggttactgagagcatgcccttattcccta

SEQ ID NO: 4439 - DNA, 669 bp, Photorhabdus luminescens
tgaataaagcgggtgcaccgacaatatcagaaatattctctgtcacggcagcatccccgcaaatgattgtttcaggcaatcccgatgtttctgctacgcctttatcaaccgcaatggacagtgttctgccttctcagagacgacaggaagataacccgatgactgaaattgtttcatcagccgtgaggccggttgatgagatttcttctgccgtcatgacagtcgcaccggagaaagggggacagtcggatgggagcacgcaacagctattgtcattaatggggatgaatgtcgcgggcacagtgacagaacagattatggcgagtgaagcggaaatcgtaccgccatacacatcaatgccttcacaacacgcggttcaggcaacatggcagaacgaaaatgcgattgagacaccctgtattggagagcaattctgggactggctgtccgctggattaaggcatggggtaatgaccattaatacgccggaagcccggatacatctggtcagtggttttgtgttcgtgagtgcgctggccattttcttccagtttctcagtgagaagaagcaggtggatggcaaggaggttagcgaaaaatggaaacgggtacaaaccgcatttgagcggttgggagacatcgagtagtggtggaagatttttgttgtcc

SEQ ID NO: 4440 - DNA, 764 bp, Photorhabdus luminescens
ctaccagctcaatctgctgttctgtacgccctgtcaatcgcatatagctcagggtaataccatctgccgggaagaaaccgcaagttgcaccatattccggtgacatattggcaatggttgccctgtctgccagcggcaaatcagctaacccatctccataaaattcaacaaatttcccgaccacaccatgggcacgcagcatctgagtcactgtcaatacaaggtctgttgcagtaattccttcgcgtaatttaccggtaagtttaaaacccaccacatcaggaataagcatggaaacaggttgtcctaacatggccgcttcagcttcaataccgcccacaccccatcctagaacaccgagaccattgatcatggtggtatgagaatcggtaccaaccaaggtatcaggataagccaactctcgtccgttatgcatttcatgccaaaccgttttacccaggtattccaggtttacctgatggcaaatcccggttccgggcgggacaacacgaaaacggttaaaagctttttgcccccaacgcagaaagagataacgctcgtaattacgttccatttctaattgaacattttgttcaaaggctttttccgtgccaaatttatccaccataactgaatggtcaataaccaaatcaacgggtgatagtggattaacttgttcaacattaccaccaaggcgctgaaccgcttctctcatggccgctaaatcaacaacggcaggcaccccgttgaaatcctgcattaat

SEQ ID NO: 4441 - DNA, 749 bp, Photorhabdus luminescens
  misc_feature (734)..(734): n is a, c, g, or t
cattacaagcaacgatgctatgaagttctgcgaatgtggctttggtcaattcaaattgaccggttttcactaaaactagtaagcgcctggcactctctgcaagatttaagatctgttgctgatcagaaaccttcctaccgccgacggtgacaccgtccaacaatgttttcacttcggggaaagtaaagggattgccttcaagtacaccagcatcccaaacaaattctggcagcatccgatgaaagcggaagcatacccgctcaatagaatgaataggaacaataagaggagccgcagaccggtcccaacgaaaccccaatgcgttgaaaagcttcatcgttgctaatcctttttactatttcgaatgcgctaaattataagtaaaacacaataaaagaccacctccccaggctatcccgccagaaacgctctcacttgacgagcggggagcaaatgtcgcggaagcttattcaacttcgtcacgtgtgactatgacggaaattcttgatcgtcacccatccccggtcgtgatcgcatttagtacgaattaataattactgaaagtttttctcttgttataaataagattccaaaatagcgccacatcttacatcactcataatttcgcctataacaataggttagtaaattcgcgcgtggcagaatcatgaaacgttatttatattaatatgttagtgatgaattagatataattttttaatattggttaattntcggataaatatgag

SEQ ID NO: 4442 - DNA, 667 bp, Photorhabdus luminescens
  misc_feature (477)..(477): n is a, c, g, or t
  misc_feature (667)..(667): n is a, c, g, or t
ctggatgaacggttgatgcatccagcgggttatcaccgtgattaatccgtaagaatccggcacattgttcaaaagcctttggcccaagacgattgactttcagtaattgtgcacggttattgaaacggccattctcatcacgccagttgatgatattctgggcaatcatacgggtcaacccggcaactctggttagcagtggaacagaagcggtattgagatctacgccgacggcgtttacgcaatcctcaacgactgcatccaattttttggcaagctgactctgactgacgtcatgttgatactgaccgacaccgatggatttcggatcgattttcaccaattcggccagtggatcttgcaagcgacgggcgatagagactgctccacggagtgaaacgtccagatcaggaaattcttgtgccgccagctcagaggcagaataaacagatgctcctgcctcactgacaatcactntttgggcttttatctctgggaactgtgtttgcacatccgcgaagaaacgttctgtttcacgggaagccgttccgttaccgatggcgaccagttccacttgatgtttgagacacaatgctgccacgcttgcagcagctttagccgtttgcccggtgtgtggatagatggtgtctgtggcaatcagtttgcn

SEQ ID NO: 4443 - DNA, 780 bp, Photorhabdus luminescens
  misc_feature (715)..(715): n is a, c, g, or t
aagcttcacagcgtccacctttaacgttaaaactgaatcgtccaggtgtataaccacgggtgcgtgattcaggtacgcctgcgaataattcacgaactggtgtaaatacgccggtataagttgctgggttagagcggggagttcggccaatcgggctctggtcaatatcaatcactttatcgaaatgctctagcccttgaatatcaatataaggtgcaggggtgatattggtcgcgccatttaactggcgttgggcaatcgggaacagagtatcattgattagcgttgatttaccggaaccagaaaccccggtaatacaagtaaataacccaactggcagattgaacgtcacatttttcaggttattacctttcgctccgatcagtttcagcacctttttcggatctgccgagatacgcttctctgggatggcaatttcacgctctccactcaggaattgacctgttagtgaatctttgctcaccataatatctttaactgagccttccgcgacgatttcaccgccatgtacacctgcaccggggccgatatcaatgatatggtcggcagcccggatggcatcctcatcatgctcaaccacaatcacggtatttcccagattgcgcaagtggattagtgtttctagtaggcgttcattatcccgctgatgcaacccgatagaaggttcatcaagtacatacatcactcccactanacccgcaccaatctggctggcaaggcggatacgttgagcttcgccaccggacagggtttcggccg

SEQ ID NO: 4444 - DNA, 686 bp, Photorhabdus luminescens
  misc_feature (652)..(652): n is a, c, g, or t
attatgaagcgttcaagcatttacaaaaagagactgaagaaaataaagcaaataaaaaaccgcttaatattgccactatcttctctttcgccgctaatgaagagcaagatgctattggtgagcttattgatgaaagttttgagctcaccgcaatggacagcagtgccaaagaatttttaagcgcagccattgatgattataatgcagcgttcaaaatgaattttggtgtagatagtaaaggtttccaaaactactataaagacctcgctaagcgagtgaaaaatcaagaagtagatttactgattgttgttggcatgttcttaacaggatttgatgcgccgacattgaatactttatttgtcgataaaaatctgcgttaccacggcctaatgcaagctttttcacgtactaaccgtatttatgacgccacgaagacctttggcaatatcgtcaccttccgtgatttagaacagactacggttgaggctatcactttatttggtgataaaaacaccaaaaacatagtgctggaaaaaagctataaagaatacatggaaggctttaccgatttaatcaccggcgaagcacgtcgcggatttttagaggtagtgacagagctacaaagacgctttcctaatcctgatgatattgntaaaagaacaagataaaaaggactttgccaaaca

SEQ ID NO: 4445 - DNA, 763 bp, Photorhabdus luminescens
aagcttatcagtgaaaacaaaaattaatttattaatgcttatataacccagaaaataagggtgtgaatagtttgatcaaacaatctatttttccaaaggaaacggctttaatcgcgttttcaaccacaagagtaattttttcataaccagttaaataattgactatcaaaaaccagcattgaaatataaacattaattaaattctataaaataagatacaatatattacagagataacttagttatttaggcaatggtaaaaccatttgatcaagttaaaaaaataaatagcaaagtattgcttataaacccaccacattgtcaggtaattactcctatttagtacttgttatttaataaaatcattataatatacttgccagctttttacggatgaccgtgactttcaaggtgcagacagaaaaagaaaccaaataaattacaaatcaatatttaaattgaaaaatacatggataataagaacctaagttttaattccaaagctatataccctatggatttcaagatgcatcgcggcggcaagggagtgaatccccgggagcatagataactatgtgaccggggtgagcgagtgcagccaacaaagaggcaacttgaaggataacgggtatatacaacaatcaggaggtatttatccttcattccgcacctaattcaggaataaaccgctttatattgtgcacctaataaactcaaaagctcatggtggtaagattgcattcctgtcaccattttatgttct

SEQ ID NO: 4446 - DNA, 672 bp, Photorhabdus luminescens
  misc_feature (663)..(663): n is a, c, g, or t
  misc_feature (672)..(672): n is a, c, g, or t
aggattgtctgcaataaccccgaaatcaataacgtcgcaatccagtttctccagcatcagtcgaacggtaagacggttggtatcataaatttgcccttccttaagtgggtgaccgatagcttgtagctcatcaccggtcgagaaaatggcgacttttaatttgcgaaccacctcaacgtcggtgatgcctaaagatgcaattaggggtaactgagcggtggataatttgctgcctgccgacaaaactactgcacctttagcaatatcttcgccagccagacggatattctgaccttgcttggctggctgagtgaaaacgatgccatcatcagtagtttctgcgtgctcctgcataatgaccgtatcagcgcctatgggaatcggtgcgccagtcataatgcggatacaagttgcaactggccattctccttgaaaaggtacgccagccagtgcttttcctgccagaggcagtggtttattgctgtttaaatccgcatggcgtacggcataaccatccattgctgagttagcaaaagggggcacattgataggagaaataatatttgttgcagtaatgcgtcctgatgttcgcgggaggctgacggtttctgtgtcagtcagtggtgtaacttgcgtcagaagtttttccaacgcctgctgcanagagatcan

SEQ ID NO: 4447 - DNA, 766 bp, Photorhabdus luminescens
  misc_feature (612)..(612): n is a, c, g, or t
  misc_feature (618)..(618): n is a, c, g, or t
  misc_feature (671)..(671): n is a, c, g, or t
aagcttcattacccgttaaaggttgagtaacaatgacagaaacaacatcatccggctgtgtatgttgttgaaaatcaatttcaatatcttgatccagaagtttcgcttttccaaacggcgcccgacgggtaatccaataaaggttggttgaacaatatgccatcataaaacgcccatctgacaacaacatattaaatacgccttttttgctgagctcatctgctagtgaagcgataaaacgaaaaaccttaggccaattggagggggttcttgggtatttttgtgaaagttgctgcaaaatccagcaaaaagcatgttcgctatcagtttgcccaacgggacgatactgacccgtttcaagctgccgatagccccgaagctgcccattatgggcataagtccagttgcgcccccacatctcacggatgaaaggatgagtattttccaacgtaacattaccgcgattagcctgccggatatgagaaaccaccactctagatttaatcggatactcttgtacaaagcgggcaacgggtgaattgtaacttggttgatgatctttaaatgtgcgacagccccgcccctcataaaaagtgatcccccaaccatctntatggngcccagtatgaccacctcgctgaatcaagccacctaaactaaagcagatatcntgttggcacatttgcactcatgccaagtaactcacacattgcccacctctgtagcctgatacccgtcatctttcaagttgcctctttgttggctg

SEQ ID NO: 4448 - DNA, 679 bp, Photorhabdus luminescens
tccctgtatcttctaccttctgaccaatacgtagtaccccggtcggagggtttgaagatcgcaatccaccttaacgtcttgagtgaaaaacaatcatgttgacgttttatattcagaagaaggagaacaatcgattcgatattgatggcgacgtcagtgaaaactggcgttggaggtagtctgacaacggtcaggacggtgtaaaccgcgaacagctcagagagctggggtgcctcgtaagaactcaacctttcgccaccccgatgcacagatatcagtcgagccgcaggaagcgcaaatcaaaccgtgccgttggggttgagagatgacattcagaataccgttttgtattgcctgcctccgtcaggttacaagcggtggtgtcgtgtgggttaaaaaggaaatcgtttgcatgtcaaagttgagtaaacagttagtcacattggcccgtcaggctggcggcagttttaaaaccgtttcagacagaatgaaaatagcccaacgtctggccgaaagcatggcgatattaaatatccaaatccgtgatattaagaatatgaaaattaatcatatttgaaaatatatcgatagccgaaagtcagagaatatttcaaagcgcacgttacaaaatgagatggcggccggtcgggcgatattcgctatggcgggaagatctcat

SEQ ID NO: 4449 - DNA, 768 bp, Photorhabdus luminescens
aagcttttgctttagccggtctacgctgtggatttactctcgcatctgtggatatcatcactctattgttaaaagtgattgcaccttacccgctttccacgcctgttgcagatattgcagcacaggcactgacagcagaaaatatcgcaattatgcaaaaacgtgtcgttgagatcagggaaaaccgcaatgacttgcaacaggcgctgaataaattagccatcgtagaaaaagtattccccagtgaaaccaactatatattggtgaaattctatgacgcagaaactgttttcaaaacattatggcatcagggcatcatcctgcgcgaccaacgcaaacagcccggtttagagggttgcctgcggatcaccatcggcagccgtaaagagtgtgagcgagtggttgaagccatcagcgccctttccactgtaaatgaacaaccaaaggagatagcaaactgatgaaccagaaactcctgtttattgatcgggacggtacgctgatcactgaaccgccaacagattttcaagttgatcgtctggataaactggcactggaaaccgaggttattcctgctctgcttgccctgcaaaaatcggggttcaggctgattatgatcactaatcaggatggtcttggcacagatagttttccattagaacaatttgaccggcacactacctgatgatgcagattttcagttcttaaagcatccattttgatgaagttctaatctgcccttacaagcccaaagagaactgtcattga

SEQ ID NO: 4450 - DNA, 675 bp, Photorhabdus luminescens
  misc_feature (493)..(493): n is a, c, g, or t
  misc_feature (589)..(589): n is a, c, g, or t
gcatgtcactgaatgcgggcagatcgaagaagaagtgctctgtttcacgcatttctggcgtcgcgccggagacagcagaacgtgggttgattagttcagttgggctgtaggttgaaccgcaaacttcacagttatcgccatactgatcttctgccttacatttcgggcagctacctttaacaaagcgatccggcagaaacatatttttctcaggatcatataactgagaaatagtacgattcttaatatgaccgttttttttcagttcgagatagattttggttgataacgtttggttctcttcgctatgcgtagagtgatagttatcatagctcactgaaaagccagtaaaatcctgatgatgctcttggttcaccgttgcgatcatctcttcaggagcaatacccatttgctgagctttcagcatgattggggttccatgagcgtcatcggcacagaataagtgaacctctttgccgcgcattcgctgaanacggacccaaatatctgcttggatatgttccagcatgtgaccgagatggattggacccgttagcatatggcaacgcgcacgtcaccaataattttntttgcgacttgagacatagtaaggatctgactcccaataagtgaaaagggattctgatgttacccgtcaaaaaatggcgcttggga

SEQ ID NO: 4451 - DNA, 779 bp, Photorhabdus luminescens
  misc_feature (22)..(22): n is a, c, g, or t
aagcttcaccgctttgtttatnatttatccccttgccagaatcaccaacatatcaataaaagcgttacaggcgaaatattcaccttaattattcggaaaaatagtgctaaataactgcttaattaacgttgcctaaccgaggaaacacaccataggcaacgttttgtttgtttcttatgacgaaacaccattcgtcaatggtgattccttatcaaactagtgattgctgttttacacaaaagattttcagatcggtagttcagaagccattttccagtttattgagctaacgctcttttccagacttatacgacaaacaattgcttctatctctttttgctcatccagtgttgctaacacttcaacgcacacttcaaattttccaggttgaactttatcagcgaaactcaatgattttaacctcactgctactccattgagcgcctgtaatactaacgttctgaccagaattgctgcttcactgtcacacactacgtgaattgtataaccttgaacttgatcaatggcctgctgcctgggctgtaaatcaataccttgagcttgtccacgtaacaatatatgtgcccaaagaatatggcaggtgctatccgcaggtagccaatattggtcaaggccacacaggacaccaatgtgcgtagatcaccataaggttgctgcggtattcatgcatcaatgtgcataccttgcccgctaatgacacccgtgccaaggaaaccaaggttggaaccacttcgtgcagaattacgacccgcacctca

SEQ ID NO: 4452 - DNA, 690 bp, Photorhabdus luminescens
cttaataagtttgatataaaatttcactatcggtaaaagaaaaccccagtctgacgatggggctttctgagcttttaatgattaatgataaccaagaaaggctattattgagcagattgagattgtgcttgagtaacaacctctttagtaccttgaatttcgatctctacgcgacgatctggtgccaggcagttgattaggttaggtttgtgaaccttatcacaggtagaaccagtgactgggtttgctttaccgtgaccttccgcgctgatgctgtcggaagggatacctttagataccagatagtcaactacactttgagcgcgtttctgagacagtttctgattgtaaacatctttaccgatccgggcggtgtagcctaaatccaggactttgcgctgtttcgggtggatattggcttactgattgtattaggtatccagattgtgcttaccttctgctttcaagtgataccttgccgatcctatctttccttggcgacgccggtttcatctcctattcttaccacccttctgtgctattcgtccttttttcccatctgggtctgtagcacgatttgagactgtttccgttgttcgctctacccgtggaaccccctcgtctgaaatgccctatgtcccgacagtgccctggctgaccttgtgaccccgtattgcataccgctggccg

SEQ ID NO: 4453 - DNA, 777 bp, Photorhabdus luminescens
  misc_feature (534)..(534): n is a, c, g, or t
  misc_feature (538)..(538): n is a, c, g, or t
aagcttcggttgcttcgattgttgggaaacacagaggaagcgcaataccagtactggagccaatagtcgcttctaatgggctaacttacaaatcaaaccctaaacacactcttggtcagcaaggtaatcgacccaatgcaggaattgaacctaagggctcggtggatttatttagtcattctatttcttctgcttctaaagaaaagcaaagatattccattgattctgaaaaaaatgttcatcgcttttcttacagtaatgatggtacatggcattggtctggtagtactggagatcaaaaaaatccattagacagacaagaaattcctaatgatgtaaagaaaaattttggtttacctggtaaatggagatagaaattatgatttttggtgatccatatcgttttgcgatattagtagaatatattccctattggagtgatagttcatttaaaaatgggttattccatttttatattaatggggaaaatgattcctgatgaactaactaccggaacattaaatgtggatgttnttcnttagatgaaaaaaatgcattagtttcttttcctgaaataaagagctatctgaataagaaataaaagaagcattcaacacgatgttaggtatgatatctcctaatctggtagatagtaacccaaatgtgccagaagatcttgaatcgccatatatctataaagcttgaaccgagaatattgatgattgtggcaagcctgattcgcttgtacctacgatgatattgattaatcattcgagc

SEQ ID NO: 4454 - DNA, 689 bp, Photorhabdus luminescens
  misc_feature (154)..(154): n is a, c, g, or t
  misc_feature (179)..(179): n is a, c, g, or t
  misc_feature (217)..(217): n is a, c, g, or t
  misc_feature (239)..(239): n is a, c, g, or t
gtgctgtctcggttttctattgctggtattacttttgccttagcagcattggcttgtatgagtattggtgcgattttacagaaacgaattcatcaagctccttctgcggttttacccctgcaatatagtgttagtctactactttgtttattgnttgttcctttccaaccttttgaatntcaactggtgcctggctttattatttcattattatggntagggctagttatctctgttgnggctcaattattactttaccgactcattcaggcaggtaatttagtgaatgtaaccagccttttttatctcgttcctggtgtaaccgctgcaatggattatttatttttaggacattcgttacctgctctaagcttgctgggaatggccgccattccatcaagacttgtattagtctctcgtacatagaaagggttccttgccacttgataaatcttgattacccgggcttacaataagtccggaaattgcttttttatgactgtcgaaatcagcgctagcactaattcacctatttccattagtaacggtagttcctttctgtttctcttaatatcccgtatcttacaagttgccttttggttggctggactccctcaccccgagcaataggtacctatggtcgcggggattcactgctttgccgactcgatgtcctttggaagccatag

SEQ ID NO: 4455 - DNA, 766 bp, Photorhabdus luminescens
  misc_feature (626)..(626): n is a, c, g, or t
  misc_feature (657)..(657): n is a, c, g, or t
cattggctgacagagattggcagggtggcatcttactttacacaggtaacaattgcctgccaattagccacataccgaacacatttgcagtaccaatgaatgctctttgggggcattgatatctaccacgtcctaaaggacgtggctccctacaggtttcagagcgtagtctggatatcttcaatgggtttatgcttctcttagcttcacagaaggttatttagcgtacaaattttttatctgaccaggaaacgcgtttagttaaaaaatcactctcttggcctgcaactttcctgaaagcagagtgtggtaatcggttcgagcgtttttcccatcccaaaacggttgttggtggcttgtcacattttgatgaggaagctatcaggcactgagctgagtgggtttatgctgcaatgagataatggttaataaggccagagagctgacctgtggttttcacaaggcaagtaattggttaaccgctctgagtctgttactcaattggtgaattttatttgctgtattcttatgtaactaaatgattctttgtttcttctgcgggattttaataatagttcctgaaagcttgtattcattagattagtacagctttgcccagtgtccgnccattctctcgaaaattcactcactgtcatnattacactatgtggtaaattggttataatcgcaagttaggacgatcgtaatagaaattccctgtttgcaagtcatcagcaatcatcagctatgatacctatcgcgcata

SEQ ID NO: 4456 - DNA, 686 bp, Photorhabdus luminescens
tgaggtagtcatcgatcggtatcatatgttcccctgtcgggcaactgatgtaggcgaagtactcgcagcgatcaaacgtaaaatggccagcggtaaaagtttgatagcccgtttcggtattatctattgtacattttaaattcgtattcattttttcagccctcagttatgctgggaaaaaccatcaaattcaattaattcaggcagatatcagcccatttctggactgagacatcaccgagaattgactgaatcatcagagttgcaggcttatcagcatggaagcgataagccactttttcaggcaggagggcctggtgcccacgtttgaggtagatacatcccattttttgcccatcgggagtgccattcagcttaacagcgccatctttatcttcatcaatgaccgattcatcagtcagcttgacaaaatgcacctcaacatcataatccatagcaaccacaaattcgtcgtgcgcacaggcaaaccagggcgatgtcccttcggcacgagcgatctcgatggtatagtctatatcgatcgcagcaacgatacggtcgtagggtgcactgcttgccgcgatttcatacatgttggaaaaaacgtaaccgttgggatcttaaccagcgcttggatccacctttgtgatatatcgatgatgcaatgctgtttatatgactacatg

SEQ ID NO: 4457 - DNA, 775 bp, Photorhabdus luminescens
  misc_feature (524)..(524): n is a, c, g, or t
  misc_feature (549)..(549): n is a, c, g, or t
  misc_feature (682)..(682): n is a, c, g, or t
aagcttattctttactgaaaaatgccctaaatctgagcaatgaagaactatctgagattttcactgactggaataacggcgaattgagcagttatttgattgaaatcacggctgatattttccataagaaagatgaagcaggccaatatttggttgatgtgattttggatgaagcagcaaataaaggtacgggtaagtggaccagccagagctctctggatttagggattccagtgacgttgatcacagaatcggtatttgcacgttatatctcttctctgaaagatcagcgagttgctgcggctcaagttttgagcgggccggatgtacaaccatttaaaggtgataaggccgaatttattgagaaagtccgccgtgcgctttatttgggtaaaatcgtctcttatgcccaaggttttcagcaattgaaagcggcatctgatgagtaccagtgggatctcaattacggtgagattgctggaattttccgggcgggttgtattattcgtgctcaattcctgcanaaaattactgacgcgtataacgaanatgtggatattgctaacctgttgttggcaccttactttaagaaattgctgatgaatatcagcaggcgttgcgtgatgtcgtctcgtatggggtgcagaatggtatcccaaccccgactttctctgctgctatntcttactacgatagttatcgttcagcggtactggctgctaatttaattcaggctcagcgtgattattttggtgctcatacctataagcgtact

SEQ ID NO: 4458 - DNA, 687 bp, Photorhabdus luminescens
tgcaatctgctttgatgttcaaccgttctgtacgggaaaacgtaacctatggttctgctgtcagtagcgctgaagaagtctctcatgcgctgacaatggcgcaagctatgatgttggtggaagggttgcctcaggggctggatactttggtcggagagcgtggagcatcaatttccaccggtgaacggcagcgtctgagtgttgcgcgcgctttgcttaagaaatctccattacttatttttgatgaagcaacatcctcggtagatacaatttccgaaactcgtatcctcaattatttgctcgataaaatgccagaacgtacggtgatagttgtaacccaccgtgttgcgacattgagtcgctttgatctgattgtggtcatggaacaagggcagattgttgatataggaacaccgagtgaattggaggcacgcaatggcctttttcagcgtttactgcatcgtgaagaccaatctgtgccggaactaatatcaatggatcctaagaatgagtgaaatgatattgatgtcacctactttgctaaaaggagtcactttggactggtctgctcaccggcgctggagttgggaattctttgcagggatgcaggaacagaagctagcactgagtaatgcacatggcgagctcgaggctgaagttcctgtgtgtgaatatattcacgctttg

SEQ ID NO: 4459 - DNA, 762 bp, Photorhabdus luminescens
gagaaaaaggtattaaatatataaattaattttatacccgtcatctttcaagttgcctctttgttggctgcactcgctcaccccggtcacatcgttatctatgctcccggggattctctcccttgccgtcgcgatccatcttgaaatccagagggtatatatttaaatcgacttcgccaataaatataaataatagcaacgccagttattatgctggcgttggctattttatgagtgattattgataatcactgacaggtgcacaagagcaatgcagattacgatcaccgtaaacatcatcaaggcgtttaaccgcaggccaatatttattggctttggtttccaaggttgggaaaaccgcagtttcacggctgtaactatggctccagtcagaaaccagttcagcttgtacgtgaggcgcgttaaccaatgggttatcttctaatgaccactcaccttttgccactttgccaatttcagcacggatcgccagcatggcatccacaaagcgatcaatttccactttgctttctgattccgtgggttccaccatcagcgtgccggcaaccgggaatgacatggttggcgcatggaagccatagtcaatcaagcgcttggcatatccatctcactgataccaaactcttctttcaacggtcgaatatccagaatacattcatgtgccacataaccggtatgacccgtataccacacgtcataatcattctttaagcgagcagcaatatagttagcattccaaaa

SEQ ID NO: 4460 - DNA, 766 bp, Photorhabdus luminescens
aagcttgactgatagcattgataccagcacttctatggggcgatttttctttcacattatgagtgcactagctgaaatggaacgggaattaatcgttgaaagaacgaatgcaggattaatagcggctcgtgcccaagggcgaattggtggtagaccagtatcactttcattcgttgaacaacaacaagcagcaagattgctggcgaaaggccacacacggaaacagttatcattaatttacaacatatcgttatctacaatatataaatattttccagtaaataaaacaaattgtcgatcaaattagtatttgcagtgcggctagttaaatgtttaattttgtattcgtaatgtccaaggctaattggttattaatttatgcaaaatatatcacgtttcttttctatacaaaaaacgtctgccgcactataagataaagaaacaacggaataagttgacaatcagctattgctagcaaaagaatctattgtgtatgaaatccactgcatctggacgtttttaggtaacgaattgccatcagcataggatttatacatctaagtaaattaatttacacttgaaaagtgtgtcagtacctggaaatcattaggtaaacgcgaccaataaagttgatttcattaattgcacaatcaaaagttacgtcattatcacaaactcggatcttactgactgggatttttgtaatttttttaatgctgtgcatgccttcaatatcaattaaccataaaccattcttgacatcatg

SEQ ID NO: 4461 - DNA, 676 bp, Photorhabdus luminescens
cgggatatctgacactcccctcagagaaacaggctgatttgcaaacttacctccaggcaaatacgccaaaaccaatgcggccgggtcaggttaactattggggtaactacccaaaattctttatcagtctgatgaagagtttctacggagataatgcccgtaaagataacgactggggttttgactggctgccgaaatgggacaaaggttatgacgttctgcaattttttgacatgatgtcgaaaggtgaagtgaatggctatatttgtcagggctttaacccggtagcctcttttccgaataaaaacaaagtcgttggtgccctgtcgaaactgaaattcctgatcacgatcgatccgcttaatactgaaacttcaactttctggcagaaccacggtgaatttaatgaagtcgattcatccaaaattcagacagaagttttccgcctgccatgttgctgttttgcagaggaaaatggctcaattgttaactctggccgctggttgcaatggcactggaaaggggctgatgcaccgggagaagccatcggtgatggcgaaatcctttcaggaatcttcaaacgtctgcgggatatgtaccgcacggaagggggtgcatcaccagagccgatgctgagcatgacttgggattacttcaacccggacaaccccacatc

SEQ ID NO: 4462 - DNA, 760 bp, Photorhabdus luminescens
  misc_feature (688)..(688): n is a, c, g, or t
  misc_feature (759)..(759): n is a, c, g, or t
taataaaatcgttgtatgtttcatgcagatgacaaaaatttgcatcagattcagtttttagtacctggtacctttctatcaatttattaaaaagtccttcaggaacaggatatggtttaggatcgttttttgcgcaataaaagtaaaacaatgctttttccaattcaggagtagataatttttcagctttattgagcaaatagctaaaagcctcaaaccaattagattctgataaaatcaaaaaatctaaagcagtagatttaacagaattattgttaaaaagatccgaatctaagatttttttacaaaaatccaaacaacattcagaatctttcaataaaagttctcctaaataatctatcgcatcatcagaaggatcttcgtatgaatccgcatttacatagccattttcaagataactatctaatcctgaaatcaactcaataagctctattctttctgtcatttgaaagttcttgtttgaacagtggctaatctcttctatccatcaggctgagccacctgtgctgatactcgcattatggtgttcggttttaaaatccgctttttttgtttggccttaccgatggtaaaactgatcaccaatactagcgaggctggacagttgattatccggcttgttgagaagaactgacggctaaagggaagatcccagcgcttaggctgngatctgtatcaactctattgcaattgcttaatctctctatctaaccagttacgatgcttttctatcaatang

SEQ ID NO: 4463 - DNA, 677 bp, Photorhabdus luminescens
ctttaacttctttgaattggctttctgcctctttatcgccctgattacgatcaggatgatatttcatcgccagccgcttataggcttttttaatctctttttcgctcgctgttttggaaacccccaaaacctcgtaataatctcttttcgccatctcttattttacccttaacatgcgcgcacgggcgcagagttccctcaacgcccgtgccggttaatcagcaacagttatcatcatctaactgtcaccgcgcccgctaagggctattattttttatctttaacttcttcgaattcagcgtctacaacatcgtcatctttcttcgcactgtcaccagcatctgcggttgcaccagcctgagcctgctgctgagcaatttccaacagcttagcggaagcctgaaccaaagcctgaattttcgcttcgatatccgctttatcttcgcctttagcaactttttccaactcagctacagcgctttcaatcgcggttttatcttctgctggcagcttgtcacccgcttcttccacttgcttacgcgtgccgtgaaccagttgatctgcctggttacgaacttgtaccaactcttcaaacttacgatcagattccgcgttcgcttctgcatcacgaaccatccgttgaatttcttcctcattcagaccggaagaagccttgt

SEQ ID NO: 4464 - DNA, 760 bp, Photorhabdus luminescens
aagctttccagttcaatcagtgtcggtttaacgaaagtgccttgatcccactcttgattgtcgaccacattatcttgtgctgcctgataaatcgtgcgccctttggtacgcattgcttgaatatggcgatcaatgccggctttggcttccgcatcaatgaccgggccgatatcggtagacaggcgttcaggattacccatccggcattcagacatggcacctttcaacatagtcatggtgcgttctgccacatcatcttgaatgcaaaggatacgcaaggcagaacaacgttgacctgcactgtcaaaagcagaagcgaccacatccataacaacttgttctgtcagcgcggaagagtcgacaatcatggcatttaggccaccggtttcggcaaccagaggggttggtcgcccttgtgcatcaagtcgtccggcaatgttacgttgtaatagactcgccacttgagtggagccagtaaacatcacacctcgcactctctcatcacccaccagaagagcaccgatggtttcaccttggccgggtaataattgcaatgcatcaaggggaatacctgcttgatgcagtattttgaccgctgttgccgcaattaatggggtctgttccgcaggttttgctaatacgctgttaccggcagccaatgcagccgctatctgcccggtaaaaatggctaatgggaaattccacgggctgatacagacaaccggccccagtgggcgatgagtatcgttagcgaaatcat

SEQ ID NO: 4465 - DNA, 672 bp, Photorhabdus luminescens
ctgctaatttcggaaatttcgacttatcaaagaccgccccattacactgcaaccacccagcaggcggcacggcagtcggccaaggaacaggaataccgacaggaatgttagaggtatctgaaattttctgttctaatgctttatttaattgagcggtaagcttggttatatcaccattatctaaaacatcctcgccagattgttccgcaataaaattagctatgacggctgatatagttgatgattgatccaacgccttatttaacaaatgagagtgaacatcatttgaaggaaactctgtctgcaaatccgaacttattttatatttctcttgactcactatgtttttattattaataacagagagagctttaaaatcattcttgggactcatatgtcctccttgaattaaataacattatttcgcaactcacatcaatcaaagtctttacctcggctgttccggccattcaatatcgggagacaatgaaatatttactctattgagcattaccctatattttctccatgtcagtaaggcggatttttctacttcggtagcgatatttaaatcaacagcatcttgcagtaatgcaatggattcactcgcgtgtcgcaacagagttacacgctgctgttccgcttgttcaatttgatttgcttttaaagcta

SEQ ID NO: 4466 - DNA, 770 bp, Photorhabdus luminescens
  misc_feature (561)..(561): n is a, c, g, or t
  misc_feature (671)..(671): n is a, c, g, or t
aagcttgcaggaaatttgggttgaccatttagtcaaaggatttagtgatcgaatgatattgccagaagcaaagggaagagcatttttgattaatttactggcaggtaaagacggcaaaattaatgataaattcgatcaaacagaaattaatgaagtgttattagcatctgttgataatattttgagtaaattatattacgaaattattgcaataaaaattaatttagataagaattcaccggtttatgaaacaccaaaaagcaataatgatttctgtggttatgtttgtgtgcatattaatgatgagcacgtcaaatgtgaatccctgatgaatgaaattaatgatgcatggagggatatattgtctaattatattttataatttcgtgtggttagagccttatttgggctctaattgttatatgattagattatatgctattgctttagcaactgctgcaactttattgggaaccactaatttctccataacattgttaatgtggaaattaactgttcttgttgaaatatccagtatatcggctatttcagcagaagttnttccctcacaagtccatcttatgacttcaacttctctggtagagagtgttggaataatgattttatcctttttattttttaggttattaaatgtttttatgcattcattngccaatatgcctaatactcctgctttattaagtatttcattatgagaaatagtgccttcttttctggcaactgaaaaatcgacctttctccatgatacc

SEQ ID NO: 4467 - DNA, 686 bp, Photorhabdus luminescens
  misc_feature (418)..(418): n is a, c, g, or t
  misc_feature (493)..(493): n is a, c, g, or t
catagctgattgaatatggtgaaatatgcgcactccctctaaacaggaagacttagtaaaagctttcaaagcgttattgaaagaagaaaaatttagctctcaaggtgaaattgttactgctttactggaagaaggttttgagaacattaaccaatccaaagtctctagaatgctgactaaatttggtgctgttcgcacccgtaatgctaaaatggagatggtttactgcctgcctgctgagcttggtgttcctactgccactagcccactaaaaaatctagtattagacgttgattacaaccatcctatagttgtgattcgcacaagccctggtgctgctcaacttattgctcgtctgctagattctcttggtaaatcagaaggtatactcggcagtatcgcaggtgatgacaccatnttcgttacactcaccagagattccacaacagaacagctgcgtggagccatccttgggttgttcgaacaagagctntaaatgaacgcgccaacatggcgcgattcattttcccgcagctattctcaggattgataagcttttttattcaacttagagagtaatttttcatgaatatcaccaaatcctccattactcataaccagaatatgatccccctgctgtgctttatcaacaataatatgcaccagtgaatctatatcagcgctcc

SEQ ID NO: 4468 - DNA, 758 bp, Photorhabdus luminescens
  misc_feature (22)..(22): n is a, c, g, or t
aagcttggatatcgttgtcatntgttagggtgatgtgatcaacattcaggctgtgttcattcagactgtaatcaatcttgacggtatggggagattgtccctgtcgcagacgtctcatttcaccgtcattgttgttcctggcatatcctattttcagtctgaaggacggaaaggttgcctcttcggtattccttggctgaatggaaagactttgaacggcacaggtcacttgataaggcaattctgcggaagaaatggctagggcatcgtcgagctcttcatggaaagtctgctgatctatatcggcaagtcgcatattcgttgagaaatcaatatcttcagtaaatcttgaactctgatatctcaggccaagcaggatcccgcctttcattatcatttttggtttcaggtattcattggaggcaatggcctgtagaactatatgtacggcctggcggaaggtgatgcggtcctgtggcgcatcggcgatccagtcttctatagagtattccatatagagtatttatcagctgttgatggatatacaccatacttcggagtatgtctttttggaaagggtttgatgctataatttaccgcttccttcacgctgaacaagcttctttcatgtttcaatcgtgcggggggttaatccaccaacttcttccagaagggaacctaccctgacttatttttcccttttcattttatcacctgtttgagattacaggcggtttcaccacatttcaccgaacctt

SEQ ID NO: 4469 - DNA, 676 bp, Photorhabdus luminescens
actgaaaatagcatctggtggtggaggtgcgtagaaatcaccactgtcaaaattctctagacggtcaaacttaacatcatagcaacgctcagggatggaaaaaccgacctcttccgagcgcatctggaggtattcaacatcagatatttcaacagcggaaaaaatcatcacaaaatcatgatcttctacagaaaaatcaaaccggtgatactggatttctccaacagtagcctcaataaatcctgtctgatgaaaagttggcattagcttattataggtagacgaagaaatgaatattgttatcttacagcaatctatacgtattaacaaaagctcataataaacatgaagctgaatagcaaactaaaaatatcgacaggttaaaaatacaactactaacttttcgtttaataagcgttatacacagttacaccgctgatatttggtcgcctccccagctcaacaaccgcttttcttcaccccaccctgtgtgggggcaggtgaatgagctctatcagccgtgcaaatgcccataacacacaacttggtttacaattcacaccatagacgccgcttagacttttaactaccctaaccagaaataattatattattaatttgaacacttgttcaacaagagactccccatgactaacctaatgcatacacgaacatg

SEQ ID NO: 4470 - DNA, 778 bp, Photorhabdus luminescens
  misc_feature (493)..(493): n is a, c, g, or t
aagctttcagacgtttttttctcatgcctcccatttccagcatcagttaactcaagctgggttcgtcgctggcgatcgcttgttagtgattatccaaccaggcttagtactttatccattgcttattgccattctggggctagggctagttcccgttatgcttgaacgcgggcttgccaaaaagcaactgagggagatactgcgccacagtcaattatcggcggtgatcactcaacctacgttaggaaaattctggtttctgctccctgaactctggcgactgcgacgttttgtcatcgggcaacgtatcttgggcatgaaagtactagaaacacccaatcaacatttaccattgagtagctttatctgccgggatttaccgccggatacaactgggttaattacctttacctcgggttctaccggcacccccaaaggcgcataccgcactcatgacagcttactagcacaactttatgccataacagcactntttgccgaggggaagaatgagatagatctacacagtttccccgttatggtgctgcactcattatgctgcggcaacagcaggattttgcctgattttgacttttcccatcccgcaaccgtcgatccacagcagatcgtcaagcaagtgcaaggcgaaggtattacatgcctcagcggcgctcccgcctatatgagcaaaatcaccgattatgctaagaacaaagggttgtcatttccctaacgtgcgaacagtcatcgtatgtggtgcgcctgccaataccgctca

SEQ ID NO: 4471 - DNA, 692 bp, Photorhabdus luminescens
aggctttgaccacttaggacacggttaagcagatctttggaatccacataaccgataacgtgatcaatatctctatcacatatcaggtacttggaatgtggctggctagaaacccgctgcttgatactttcctcactttcatccttatcgaagtaaatgatactttcccttgaggtcatggcagaaggcactgtgcgggattcgagctcgaacacgttttcaatcagttcatgctcttgtttacgcagcacacccgcaacagcccctgcttccacaaccgcaaaaatatcatcggatgtgatatcttcattacgtgctgtcggaattttaaagagcttaaagataagatcagacaggccattaaatagccaaactagtggacgaaaaacggtcagacagaaacgcattgggttaacgattttcacggcgactgcttcaagcttaatcatgccgatacgttttggtgtcaagtcagcgagcaaaataaatatactgggtaacaatgataaatgagcagataaagctcaactggtctgcccattccgtgcgcataaatttcatgaaaaaccgtttcaatgaaggagagactgcggattcaccgacaccacctgccaaattgctactgcatttacgccgatttgcacccacggaaacaacattcccggcgtttcttgtaatttgaggacatgagc

SEQ ID NO: 4472 - DNA, 762 bp, Photorhabdus luminescens
aattcatgcggtttctcagaattgtgagcatcaaagaaaatgcaactttctggtatctacggctgtagtactaaaccgtgttgcaataatgatatgggatcaccggcgctgatcaatcagattaaaccagacagagatagaacggttccaagagcaaggccaacagtggggacaacacgtaagacaaatatactgatgatcacagtcaaaagaggaatcaacgagctaagagttctcatgtgaaaaatttcatttgaaaacagtatgttaaatataaacacatataaaacataaaaataaattataataaatgaaattcttattataataaaagagtcctttgaaatatcgtttttttgccaacataactaactttttatatttaaggagttaaatatgccagcagctcaagcttatgctccacccggtttttggggccttggattgatttacaaggatggtttggtagtaacagccacggtgttataccctatggatttcaagatgcttcgcggcggcaagggagtgaatccccgggagcataggtaacgatgtgaccggggtgagcgagtgcagccaacaaagaggcaacttgaaggataacgggtatagatatactttcgatacagaatcacaggctccatccacttttttcgttgaaatacaatatgtagatgaaccaacactaaaaacgatacaaactataggccctggtgattatctggtccgtagtaacggcggaataggaacagatagaatcag

SEQ ID NO: 4473 - DNA, 678 bp, Photorhabdus luminescens
  misc_feature (654)..(654): n is a, c, g, or t
gtgcacgactgaccatcaacgttaacaaggcgcatttcaacttgcttgcccgggcattgccccaattgttcaatgataacaatcgcggctggctggaacaggccaagatcatggggccgaaaaatctgggcagccgtaccgaccaagctgtgatctacctttccaaagccgggatcgagcatgctcaaaccatcagcgaaaagcttagcgaactgttaccggcgacagcctttgtcgaacacaccccgacaggtatgtatcgcgtgggcaagggcatttcctactctgaaacggccgcgggcggatcgagcagtcacggtcagtcccgggcacaactgattgcggcagcaggtacacagtccttgctgaccgatattccaatcgagaagaccctgacgcataccttgcagacacgcgggtacgatgtacacaacccggcgttgctctcacaagcactacgggatagcgagctcaaggggacgctggcaccaatgagtggcgattctgagcctcgtcaggtcagtgccaatatccatcagttcgccgccgatcctgtgttgttcgccaaatccaacactatcaataccgagacattaatcaggtcggggagtttcccagcagaagggaacgcccagctagtgaaaatcgaatcangcttgtacgagctcgaatacactg

SEQ ID NO: 4474 - DNA, 769 bp, Photorhabdus luminescens
  misc_feature (22)..(22): n is a, c, g, or t
aagcttatttattctattgtcntactgcgaaaagatgaataggtcacaaatggtcagcattaggataagtaactactgttgacgacttatgaccatgaagcgcccgaactgttatttatgacatcaagtattattgtggctcaaattctggttaagtaaagaatgcgatcagtaaaggtgcgagcaaactcaggatgaaaccgtgaactatcgctgctggaacaatactgacgccaccgcaccgttgtaatattggcaaggtgaaatccatcgaagtggcaccacttaatcctagagcgcttgagcgatatcgattgattagaaccggaattagcataattgccgccagttcgcgagccaggtcattaaagaatgcagcactgccgatgactggtccgtaagcatcagaaagtaagatgccagaaagggaataccaaccgtaaccggaagccaatgctaaacctgttttcactggcagcccaagaataagtgcggcaattgcacctccggtaagcgcactgacagcaatgacaattgcaataatggtaccgcggcggtttagcaatatctgtttcaggctcataccattgttacgtaattgaataccgacgagtaacaataaaacgattaaagcaatttcactggcatgattggagaagtgcaaccatgaccagccagtgagcccaaataggaaacctaaaatcagtacaccacataatttcagtgattcaaaaatcatatgtaaacgggaagggggtttgtcctgtta

SEQ ID NO: 4475 - DNA, 678 bp, Photorhabdus luminescens
  misc_feature (632)..(632): n is a, c, g, or t
ctgatgcacgcaggtaaccttcaacgccgtcagccagttctactgtcgcacctttagcatcaactgcggtaactttaccagtaacaatagcacctttcttgttcacggacaggtagttattgaatggatcttctgccagttgtttaatgcccagagagatacgctcacgctctgcatctacttgcagaacaacagccgcgatttcatcgccttttttgtattcacgaacggcttcttctccagcaacgttccaggagatgtcagacaggtgaaccaggccatcaatgccgccatccagaccaatgaagataccgaagtcagtaatagacttgatcttaccttcaacgcggtcatttttgttgtgagtctcagcaaataactgccaagggttagctttacactgtttcagacccagggagatacgacgacgttcttcgtcgatatccagaaccataacttccacaacgtcaccaacgttaaccactttggatgggtggatgtttttgttggtccagtccatttctgaaacgtgtaccagaccttcacgccttcttcgatctctacgaagcagccgtaatcagtcaggttagttacgcgaccagtcagtttagtgccttctggataacgcttancgattgctacccaggatcttcggcccagtgtttaggcccaaagata

SEQ ID NO: 4476 - DNA, 769 bp, Photorhabdus luminescens
aagcttttgctaaagagcacagttatacaaaattctcaatggttcgctttggcaacgtccttggctcatccggttccgttgtccccctattcgaaaaacagataaaaagtggtggaccgataaccctcactcacaaagacattacccgttacttcatgacaatcccagaagcggctcaattagtcatccaggcaggagcactgggcaataatggcgacgtctttgttctggatatgggagaatcagtaaaaatttatgatctcgcccggaaaatgatccatctttccggcctgacagtgaaagatgaaaccaatcctcatggtgatatcgaaatcaaaattaccggattaagacccggtgaaaaactttatgaagaactcttaattggtgataacgtctctggcactaatcacccaagaatcatgacagccaatgaagtttttctgacctgggataaattaaacccattattaaatgacttaaaaacatcttgtgaaaattacgattttgaaaatattaggcagatcctgattaatgctcctattgattttcatcctaaagattatatttacgatcttttaaaataatacttacaaatacactcatgtcatgaaactggctgaaaatcatattaccgacattagccttctagacaaataataatcctatgaaatttttaacacacgagaaattaaaaatcaaataattcgaaaattaaaataacaagctaacaaaaacctcattattagatatacgctatggatttcaa

SEQ ID NO: 4477 - DNA, 685 bp, Photorhabdus luminescens
gctgccgttgtccggtccccacaggagaacgcctcgttcttcaagatgcttgagattatgttgcgttgcttgagctcgaaacatttgttgattcattgcgggtacggcggcaattggggctggggaggccaaacaaagagttgttacgagatcatttgccataccgacgaccaggcgtgccagtaaatcagcagtagccggggcgagaataatcagatcagcccatttaccaagttcaatatgccccatagcagcttctgctgctggatctaacaagtcatcggaaacgggataaccagaaaccgcctgcaacgtcattggtgtaataaacgattctgctgctggtgtcatcactacacgtacttgtgcgccgcgatcacgcaggcgacgtactagctcgggagttttgtaagcggctattcctccgctgataccgagcacaatctgtttgccggaaagtcctgccatcatgattgtccgaatatataagttgcaaggggccaagattttatcacaagagattacagagttgagcagagtctgagctttgattgtaaaaaagaataagtttgcgagcggctacgcagctccggaatatgatattcgcccttatatttaaggcgtggaatacttgttgtatcacgtgaaacagagcagggagatgaatatatggtaattgatgtca

SEQ ID NO: 4478 - DNA, 767 bp, Photorhabdus luminescens
aagctttaatgcttgcctcgatatctttcctgacgacgagacgattgaactggcggaacaagagcgattggcagaggatttgcgtttactctatgtcgcattgacgcgttctgtttaccattgcagtgtcggcgtggctccgctgataaaaggcaataagaaaaaggccggggatactgatctgcatcaatgtgctctgggctacctgttgcaaaagggggtgaaaggggatgctgattttctggcaacatcgcttaaagaattaagcggagatggcattgttatatcatcaattaatgagactgatgatcacccttggcaatcgcaaagtaaaaatgatttagtcctgtcggccaggcaatttaaacgtagagttcaggatgattggcgtattaccagttattctggtttacgaaactctgtagttcatcgtggtaatgcttccgcttattttgctggagaagaatctattgacgtgattgttcagtctattgcgccaaaacttgatgttgatgctagtggtgaaagacagttagtagaacaacctgaaatgacaccacatacattcccacggagagcttccgcggggactttcttacacgctattttggaagaacttagtttcagccaattacctgatgagaaatggttggcagaacaacctgcatcagccggatttgatgaacgctggagtgggacattacagcaatggatggtcgatatttctactattccattgaatgatgaaggagtgcaattggcaaaat

SEQ ID NO: 4479 - DNA, 674 bp, Photorhabdus luminescens
catcaacttttttgatgaaattatccgtcagcttttgaatatcatcctgcgcacgacgctcatcatcttcactgatctctttgtctttcagcagtgctttgattttgtcgttagcgtcacgacgaatattacgtacagagacacgcccctgctcagcttcgctacgaaccaccttaatcagatctttacgacgctcttctgtcaatggtggtaaaggaacacgaattgttgtccccgcagaagatggattcagccctaaatcagaagccatgattgccttttcaatcgccggcgtcatagtacgatcaaataccgtgatagccaaggtacgtgcatcctcagcgatgacgttagcaagctgacgcaaaggcgttggtgcaccataatactcaacaatgataccatccagcagactaggagaagctcggccagtacgaaccttgctgatttggtttttaagtgcttcgacgctcttttccatacggtcttgtgcgtcttttttgatttcattaatcacgttacaaacccttgggaactggttgttttaaagccataagctattatgaccatgtttgttaaatttggcgtatcaggcgactcatcataccgccaaacatctctggtgtctttgacattactcgtgaaaatcagggtgccttcttttcttcattacc

SEQ ID NO: 4480 - DNA, 767 bp, Photorhabdus luminescens
caggcaatcatagacaacaagattccagctgcgatgatagatgattttgcaacgacagaagaaacagaacaactttcgtctgcaatcctgagcataaaggcaaaaccctatgaattcggaaggccggggttttatttgggaaatacactcgctcattatcgtgatcgaccaaaagagcaatatttttctcaagttagcgtagctgaacaagatcgcatccaaattatcaatcaagcttttgatccagttgatcggttcatgcgatacaccaatcacgatacaaatttcagcatttcagtcgcagaagagccggggttcggtccctattttgccggtatcgtccgaattatctccggtggctcagatctacatgtagattacgcacccacttttgcgaaagggaatttaatcatcggagatatatcgactcaacttgcttggaacctctatattttatctccctctcagggaggagaaaccgtgatctataatcaaccattcaagagtactgtggttgataaaacatacaagccgtatgacagttctctattagttgattgcgaatctttcacttttcgacctcaagttggttcagtcgttattttcaacacaactaaccctcatattgtcctgcctgcaagtggcaatcgcattgcaacaggctccttcatcggtgtattaaatgagaagaagctgattttatggtcgtaatacatctcagcgaaacatttgggacctgaatattaagattgctttttcttactctc

SEQ ID NO: 4481 - DNA, 670 bp, Photorhabdus luminescens
gatagccagccaccagatatgccaaatcatggcgaaaccaaacagcaaggtaaagccagcaataattacacccgcaccggcatttttaggcatatgaatttcttcatacttagcaggacgtttataagcagtgcctttttctttcatatcccaccatgcatcacgggtttgaacatgtggaacgtcagcaaagttataaaacggtggtggagaagatgttgcccactccagagtacgtccgccccacgggtcaccggtcaggtcacggttttggtcacggtcacggatactaacgtagaattggatgacctgacacaggataccaacggcaatcagtgcaacaccaatcgcggagacgaccagcagattatggaattcagggttgatatcttggctaatacgacgggtcatccccataaatccgagcgcgtaaactggcataaaggcgataaagaagccggtgatccagaaccagaatgcgcggataccccatttttcattcagtgtgaaaccaaaagctttcgggaaccagtaagcagtaccagcgaaacaaccgaagacaacaccaccgatgatcacgttatggaagtgtgcgatcaggaataagctgttatgcagaacgaagtttgcacctggaactgccagcagaacgccagtcataccaccgatg

SEQ ID NO: 4482 - DNA, 766 bp, Photorhabdus luminescens
aagcttacagcttcacggatcttgtggccgagaaaattcgttcagtgatccagcagattgtccgtaaccgttcacgtcgtcaggacatctacgacctcaatctgcttttagacagcatccaacctgaaaacaaggacaaattggctatactgaccacactactggaaaaatccaccggtcgcttggaagacggaatggtcaaccccgaaaccctgggcagagtggatatacgtgaacgatcctcacgggaatatgaactcctgaaagacgaggtcgaaggggaacttatggactttgataccgcctatacacgtattgtggatttctataaatccctgccttgggacttagtaacaggttggcagaatgttgcaaaatagcctgtatctgtgtcatcaggggcaacgagacgagcagctggatagatttttctttatcaacactggtgtatgttcggtctccgtgatggcagatggattcagccactgccatgccagtccgcattatgttgactggctgggtgaacaactttatgcactggaaaataccggaagttgctgcaacgagctgtgcggagaagtcctccggatcctgagctgtaatgactgttatccgggaaaggctagtattgcggttatcgtgtctgatcaagaaaaataccgctatgccactctgggtgatacacggatttactggccctcacacagcttcagaaccaccgaccattcactggcccagcgctgtattgaccgaggaaactgcccac

SEQ ID NO: 4483 - DNA, 681 bp, Photorhabdus luminescens
tgcacaatctgtggcgtccagatattaatcgcactcaaggtattggttaaacagaagtaagccagggtatacatcagcatgatcggcgcgaaaatttcacgccatatactgggtttttgcattgcctgatgagttgatgagcttgctggttgaaccagagcgggctggtcgttatccatcatctcttgtaagcattttttgtcctcatctgtcagccagttagcgcgtttgggtgaatcatcaagatagaaccaaacgacaattcccagtagtaccgaaggaaaaccttccagcaggaataaccattgccagccgtgaaggttcatgaggccatccatttccagaatataaccggaagccagagaaccaaacgccatcgtcaccggcattgccaccataaacagtgcgttggcacgggcgcgatagtaagccgggaaccaataagtcagatataacaggatgcccggcacgaaacctgcttcggcgataccgaccagcatccgcaagatatacagactggttggtccggtagcgaacatggtggcagtggaggagatcccccagagcaccataatcgtggctatccagcgtcgcgctccgacaatgcttagcataatgttgctaggaataccgaaaatgacataagtgacatagaacagcgttgccgccagaccgaacatg

SEQ ID NO: 4484 - DNA, 766 bp, Photorhabdus luminescens
  misc_feature (22)..(22): n is a, c, g, or t
aagcttatttattctattgtcntactgcgaaaagatgaataggtcacaaatggtcagcattaggataagtaactactgttgacgacttatgaccatgaagcgcccgaactgttatttatgacatcaagtattattgtggctcaaattctggttaagtaaagaatgcgatcagtaaaggtgcgagcaaactcaggatgaaaccgtgaactatcgctgctggaacaatactgacgccaccgcaccgttgtaatattggcaaggtgaaatccatcgaagtggcaccacttaatcctagagcgcttgagcgatatcgattgattagaaccggaattagcataattgccgccagttcgcgagccaggtcattaaagaatgcagcactgccgatgactggtccgtaagcatcagaaagtaagatgccagaaagggaataccaaccgtaaccggaagccaatgctaaacctgttttcactggcagcccaagaataagtgcggcaattgcacctccggtaagcgcactgacagcaatgacaattgcaataatggtaccgcggcggtttagcaatatctgtttcaggctcataccattgttacgtaattgaataccgacgagtaacaataaaacgattaaagcaatttcactggcatgattggagaagtgcaaccatgaccagccagtgagcccaaataggaaacctaaaatcagtacaccacataatttcagtgattcaaaaatcattatgtaacgggaagggggtttgtcctg

SEQ ID NO: 4485 - DNA, 679 bp, Photorhabdus luminescens
ctgatgcacgcaggtaaccttcaacgccgtcagccagttctactgtcgcacctttagcatcaactgcggtaactttaccagtaacaatagcacctttcttgttcacggacaggtagttattgaatggatcttctgccagttgtttaatgcccagagagatacgctcacgctctgcatctacttgcagaacaacagccgcgatttcatcgccttttttgtattcacgaacggcttcttctccagcaacgttccaggagatgtcagacaggtgaaccaggccatcaatgccgccatccagaccaatgaagataccgaagtcagtaatagacttgatcttaccttcaacgcggtcatttttgttgtgagtctcagcaaataactgccaagggttagctttacactgtttcagacccagggagatacgacgacgttcttcgtcgatatccagaaccataacttccacaacgtcaccaacgttaaccactttggatgggtggatgttcttgttggtccagtccatttctgaaacgtgtaccagaccttcaacgccttcttcgatctctacgaagcagccgtaatcagtcaggttagttacgcgaccagtcagtttagtgccttctggataacgcttagcgattgctacccaaggatcttcgcccagttgtctcaggcccaaaat

SEQ ID NO: 4486 - DNA, 779 bp, Photorhabdus luminescens
  misc_feature (748)..(748): n is a, c, g, or t
aagcttgccacagctattacccaaattttatttaatagaaaagcgaaataaccatattcaggaatatatcgcaagactttaaataaaaaatgcccatccctgacggtaaggagatgagcaaaatggtaccaaccaaatctaaataattatcaggccgtttgggctaaacttagtgtttgcaattgtttatcacccgcatataaacgcgcctcagtgccaccaataaaataacgatttcctcttgtgggtactgaagtttcatcaaaccaaacaacagcaaccgattcatgatgccagcctaggggctgaaccgaaagctgccagaaatgccctctaggactgacctcggtcacctgtaccggcaatggactggaaagtgtcggttgcgagttcatcatgatatcccacggacgcaagaatacatcaacattcccctgatggattggcgtcacattgagaggcaagtgctgtccgccaatcaacaactgagagcctttaatttctccactaaaatgattgacctcacccaagaactccatcacaaaacggcttgccggataacgccatacctcttgtggcgtacctacctgttcaatattcccttgtctcataacaacaacccggtcagccacttccatcgcttcttcctgatcgtgagtgacaaagacgctggtaaatttaagctcttcatggagctggcgtagccaacggcgtaactccattcttacctgagcatccagtgcaccanatggctcatcgagtaatagaatttgtggttc

SEQ ID NO: 4487 - DNA, 690 bp, Photorhabdus luminescens
agcacggcgctggccacggtacgcgatactttctataagacgatgagccatttcgatgaagagcatatattgctgcttgaacgggcgatagctgattggcaacagcatagcccaaaggagtttgctctacgcaccaatcaggtgaacttagtacgttttaaaatgggccgaatgatagagcacttacaggctcagcgagctgaatccgctggcgtccttgggatcgccgtggcacctcaacatgctgaacatcttacgcaacgcgtcatctttgatggaaccggacgtgttgtcggtttaaaaggcggtataacacaaaacgaaattaatcgtcttattgaatggcagattaccccgttgacccgaacgaattcaaccgctgaacgggaagcgcctaagaccgaaagtgaaagtctgattgcttttatgagccgattggaaaccgcgaatatcccggaagcgaggtttttgattggacgggccaggggactctggctcaccggacaagtcacctcgaaggaaactatcaagttatttgatgatgctgccagtcagttacaggcataccctgagttacatggtttggtactgtcattacaggctgatgctcacagagaaaagtcaactacccaatatattgacaacttatttggtcgtcgttttgattccgaagtggcccatacgttggta

SEQ ID NO: 4488 - DNA, 790 bp, Photorhabdus luminescens
  misc_feature (699)..(699): n is a, c, g, or t
  misc_feature (761)..(761): n is a, c, g, or t
aagcttgaacttaatcatgaaacagcactgcatgccaaatatgcctacgccccacgttttccatcaatggttgaaggtattcgtggctacatgatgaatgtagacgatcatataaaacctgaaatttcaaaaaatatcgaagtcgggctgacatcacgcttcccggatatcattgctcaaaatgatagcttcgatatcgcaatatcctactttgataaccgggtgaaggactatatcagccggtcatggatggatgattactggagtatgtacatcagtaatattaaagaggctaaatttgccggattggaattggcaagtgtttaccatagcgatcactttgatgcgcgtttatcgatgaattactacacaaaagtcaaattctgtacggaaaatgacgggtgcatcgcacgtagtctcccttcggattatgcaactaatcatattccgcctaaatatgcggtatcactcgatctgacacagcgatttttaaatgacaatgtatctgtcaacgccagagtttcccattatggacaaagatctgtaccagcaggaaaaccaagacgcggttctgctcctctgttggcacccattatttggcggcctgcaactgtagccgatatctctctgactgcccgtataaataagcatgtcgaatttgagctcggtgtggataatgtgttcgacaaatattatatncaacctcttagccttggctatatcccttcaccgggcagaacgtttcgtgccggtatcacaanctatttttaaattcattcggtaagctgga

SEQ ID NO: 4489 - DNA, 706 bp, Photorhabdus luminescens
acgaatgggcgaagaaaatctcagaacatttactgccacgtacccgtgcttatgctgaactctggttggataaagaaaaagtcgcaacgaccgatgaagagccgattcttggctcgacttatttgccgcgtaaattcaaaaccacggtagttattcctccacagaatgatgttgatctgcatgccaacgatctgaattttattgctattgcagaaggtagcaagttggttggttttaacgtgttggtgggtggtggtttggcgatgactcacggtgataaaaatacctatccaagtatggcgagtgagtttggttatatcccgcttgagcatacgttggcaattgcggaagctgtggtgacaactcagcgtgattggggtaaccggactgagcgtaaaaatgccaaaaccaaatatacgttggagcgggttggtgttgagacttttaaagcagaggtagagagacgcgctggcgtgaaatttgaggcaatccgaccttatgaatttactggtcgtggtgatcaaattggctggctgaaaggtatcgatgataaatggcatttgacactgtttattgagaatggtcgacttttggactaccccggcaagccgctgaaaagcggtgttgctgaaattgccaaaatacataaagggggattttcgcctgacggccaatcagaaccttatcatttgctggtattcctgaa

SEQ ID NO: 4490 - DNA, 788 bp, Photorhabdus luminescens
  misc_feature (14)..(14): n is a, c, g, or t
  misc_feature (554)..(554): n is a, c, g, or t
  misc_feature (777)..(777): n is a, c, g, or t
agcttacaaacggntttcctgccgtttgctcttcgggccgccgcccctcgcgacgttcaaatccgttcccgacggagttgtcctactcgctaccactggggtgttgtattgcttttctatcgccatacaacacaaaattaaagcctggcagtgtcctactctcacatggggagaccccacactaccatcggcgctacggcgtttcactgctgagttcggcatggggtcaggtgggaccaccgcgctatcgccgccaggcatattcggttttcttccggccgttgtcgctcttctgccacaaccacccgaatcaatctctgaacaagctgaaaagtcatctctctgctgtcaaccggcttctgccggctgccctctgaacaccaaaacaccttcggtgttgtaaggttaagcctctcggttcattagtactggtcagctcaatgcatcgctgcacttacacacccagcctatccacgtcttcgtcttaaacgttccttccgtgacctcagtcaggggaagactcatctcaaggcaagtttcccgcttagatgctntcagcggttatctcttccgcacttagctaccgggctatgccattggcatgacaacccgtacaccagcggtgcgtccactccggtcctctcgtactaggagcagcccctttcaatcttcctgcgcccacggcagatagggaccgaactgtctcacgacgttctaaacccagctcgcgtaccactttaaatggcgaacagccatacccttgggacctacttcaancccaagatgtg

SEQ ID NO: 4491 - DNA, 678 bp, Photorhabdus luminescens
aggataatctgggggtcatgttattagagcgcaccagccgtaaagttttgtttacgcagcaagggatgttattagtagaacaagccagaacagttctccgtgaggtgaggattttgcaggaaatggcatcacttcaaggggaaaatatgtctggtcctctgcatattggcttgatcccgacagttggtccatatctgttgcctcatattatccctaggcttcatagtttgtttcctaagttggaaatgtatctgtatgaagcccagactcaaagtctgttagcccagttggatagtggcaaattggactgtgcgattctggcaatggttaaggagacaagagatttcattgaagtgccattgtttgaagaacccatgaaactagctatctatgatgaccatccttgggcggagcgtaaaaaaatcgctatggatgaattggcaggtgaaaaattgttgatgctagaagatggtcattgcttgcgtgatcaggcaatggggttcttgtttcaggctggtgcgaacgaaatacccattttcgtgaacccagttggaaacctgcgtatatggttgctgccggagtgaataccttattcctgatttgcaggccacaaagaaaacgtgaggcgctgcttctgagtgtacagcctgacctaacggtcgttgtttattatcgcct

SEQ ID NO: 4492 - DNA, 777 bp, Photorhabdus luminescens
  misc_feature (71)..(71): n is a, c, g, or t
aagcttccgcgacatttgctccccgctcgtcaagtgagagcgtttctggcgggatagcctggggaggtggncttttattgtgttctacttataatttagcgcattccaaataccaaaaaggatcagcaaccatgaaactcctaaacgcattgcggctcccctgggaccgctttgaggcttctctcaccgtcctatcaatcctatcgaacgggtacgcttccgctttcaccggatgctgccagaatttgaacgggatgctgcatgaccttgaaggcactccttttactttccccgaactgaaaacattgtcggacggtgtcaccgcctgctgtaggaaggtacctgatcatgatcggatcctatacgctcgacacagtgcccagggctcactaggtttattggaatccgatgccccctcccttcgccacagccgtcttccggccacttggtaatataaacccgcttggtaccccgttttcccaccgaccgcacgcgccccgctcccacagtactcttctcattgctcattggtgatcccccttccctgtctgtcccgttagcttgtgtcccctccccccccgtcttgcacccccatggtgagactccctcatcccctccctgtgatctgcgctgtgtcctcactccggttagttttcttcacacgatcacattcccctcccgtttgccctctttccccgttcttctgtccgcccccctccctaccgtttgaaccccgtcctccttgcccccctttctgctaatttccattcacccgag

SEQ ID NO: 4493 - DNA, 746 bp, Photorhabdus luminescens
  misc_feature (237)..(237): n is a, c, g, or t
  misc_feature (271)..(271): n is a, c, g, or t
aggcaaaaatatcttcatgtatgtcgctcaacaagtaactaactcggtgttacacgccacgtgactatcgtaggtgatgatcgtcgaatcctgagtggtcgctaactctcacctttacgatgggctagcacattaaagcactccactaaaaatattaataaccaacagggttattcttggcgccacgaggtaactcaggaaagtgaaaaactgcatcatgcaggaaacaatatccangccaaaggaaatgcgagcttaaccgcgacagaangtgactctaagatccttggcagcacaatccactgccacggtgaccttaccgcccaccagcacaaaattgtgcctaaactgcgcgttgtttccttgatacaataaatcacctatcgtctctttgttacattcgatttagtctccctgtttacgtactagactcttatcgattgattgatattactccctatttatcgttgcattggccactatactttcctccctttccaccattctcactcttgccccttgcctatccttcgcttcccctcgggtcccctatattcttatcctcctccattccgccatcctttcccggtccatcattttttcccttattcgttgctactacctatttctcctattatcgctctatacatccactacccactgttgatgtttattataacccataccataaattccgacctgtccgtcgcgcttaacgcccatccattctccataccctcacacca

SEQ ID NO: 4494 - DNA, 760 bp, Photorhabdus luminescens
aatgaaagtaaaaatggaggatatatgagcacagcagtacaaaaagtttatgaaatcatcaacccgctcaagactgaatttgagcaaatttgtagtgagccgggcatagtatttaaacgtgagtctgaatttgctatgcagatattcgcaaataatgattttttagccacaactgcattaaataatccggtttcagcgcgtagcgcagtaatgaacattgcagcaattggcattagtctaaaccctgcgcaaaagctggcttatctagtgccacgaaacaaaagcgtgtgtcttgatatcagttacatgggtttgatgcacatcgctcaacaatcgggtgctattaagtggtgtcaatccgctgttgttcgaaaaaatgacatattcaagcgcacatctattgatactgcgccaattcacgaatacaacgaattcgacacagcgcaatcgaggggggacattgtcggcgcgtatacagtaatcaaaacggatgactgtgattacattactcacacaatgagagcatcagctatatttgatatcagagatagatcatcggcatggatagcatataaaacaaaagggaaatcgtgtccgtgggtcacggacgaggaacaaatgattttaaaaaccgtagtcaagcaggcggctaagtattggcctcgcagggagcgattagataaagccattgactatgtaaacacagaggcgggtgaaggaattgattttagcaaaggtcaaaactcttacattgacgtaa

SEQ ID NO: 4495 - DNA, 692 bp, Photorhabdus luminescens
  misc_feature (584)..(584): n is a, c, g, or t
  misc_feature (680)..(680): n is a, c, g, or t
tacaggatgcgcattgtcgtcaagttcccatttatgctgaatgcggtggcctgatgtaccttgggaaatcgttgaccgatggagaaggggcgagtcaccagatggccggtattctgccgggggaaagccatatgggtacgcggttgatgcgctttggttactgtcaggcacaggcccgttttgacactttgctggccgcagaaggtgagattttacggggccacgagtttcattattctgattttatcagctcagtgccttcagtctttgactgtactaaatggcgtgacgggatggcaatacagcaatgggccggaggctatcaggtacagcagacactggctagttatcttcatatccattttgctcagcgtcctagtctgcttgatcgctggttgaggtctgcgaggaggttattgtgacacttgctgcctggtttgctgctttcttgctcgatagctggttaggtgatccgccgcattggcctcatccggtgcgttggattggtaagctgatctctatggtacagcgggcagttcggcgctgttgtcacagtgaacgagcattgaaagtcggtggagcanggctatggatagtggttgttgggctgacttggttggtgagttggggatgcttgtggctgatgaacgccattcatccttgggtcggctggctggtcnaagtgtggatga

SEQ ID NO: 4496 - DNA, 769 bp, Photorhabdus luminescens
aagcttctattcgccgggcggcggcaatgacatcatcataaacagaaatatttttcataggaataaccgtaagttatataaaatattagacaaaatatccacaccagaaaaattcgtcaatagtaaaggttgtgactaaattttgacttaccacaatacctataaataatacctataaataatacctataaataatgcctataaacaatgcctataaacaatacctatagttcagaatctctgtgcgcttgattaattatcgcttttgccatccatttagtgatctcaataatttccgcattatccatctgccagatatctttcatcaccagaaagacctcggagccataaattagggaaaaagaccgaatgacattttccaaaatatccggcggaaaatgcccttttaatggttcaacaaccattgccaggatatctttacgatgcccacgtaccaatttcttttcctgcttaccctcagataaacatccctgagcccattgttgcaaggaaactaacagagcagctcgcaatgcaccttcgtattgaaacattcggggataagcaaagtccaacaactccgtaatccgctcctcagtcttttcactagcaggcttccaagtgaggatcggcccaaggctggcaccaacaatcgcatcaattaaatcactttgtgtcggataatagcggtatgctgttgctctggaacaccagcatgcattgccaattcagaaaccgaggtatcgctctctgttcaaaaagcgccata

SEQ ID NO: 4497 - DNA, 680 bp, Photorhabdus luminescens
  misc_feature (607)..(607): n is a, c, g, or t
  misc_feature (629)..(629): n is a, c, g, or t
tgtctttaattgcttatagtctgtttttccattacgatttttaggaatagcccctatcactaatcttgttggccacatacttctgggcataagctgttgacatattttacgtagctctagattagatttttcatgccaagaaataaaaaacactaatccttcaacacagttccctgctataacaggccagccaataaccgcaatatcgtcaacccctactgctttactcagcattgactcaatttccaaacgctccaaacgctgaccattgactttcagttgatcatcacaacgccctaaaaaatgaaatatcccatcattgtcacgtttaacccagtctccagtacgataccaataacaactaccatcatattcgaaattatcagcctgcatagtgttacttgataagtaaccactaaccacttgctcaccgccaatccataattcaccttctcctacatcccctgcgttttgacgctggcgtccaatctttaactttgtaccaggataaggagttccgattggaacaatcaattcattagtttctgtcggctcaggactccagcgataaccacaaattgcaactgttgcttctgttggtccatanatattatcaatatgtgatgcangtgcagccatatgccagcttttagccatgctctgtaacaatgtttccacaa

SEQ ID NO: 4498 - DNA, 767 bp, Photorhabdus luminescens
aagctttagtatcgattcctttgccagtgaatgtatctaccagaagatcatcaatatagacttttactgtttgttgatggatagctgtattagtataagctatcaggccaaatcgaatactttgaggtaattggaaacaatatttaccgccatcactagtgccgcattctccagcgcaattggagggtttggtaaccgggagacaaggatctttaacttgtgtcattttccacaggccggtatagggtttacgaaggttattagcagcagtgtatacatggcatactgtgttagggactccaacccaaccattagtatcaagaaagcctcgggttccccatcggttatatagcgtaatactttcatcttctttgatttttccatcaatcgatggcatgtcagaataaataatccactctaatgtttctggacggatatttttatctgatgtgtgtatcgggtatatttcgccttctggaacctgttgacttgataatgcataatgtgctaaatagccgccatcacattgataaagattgtggagtaaaatggtatcgttgttaataacttcactgccgataggtttacctgttcctgattcaattcgccagaatgttcctgcctcagtggtggttatcaccgtatgtctgccatctgaaataccactcgttccatatacactaagatacccaccatcccagtttctgaaactatttaatatttttacggcatcgccatatttaagtatattcgccataatttctcca

SEQ ID NO: 4499 - DNA, 682 bp, Photorhabdus luminescens
taaacatggaagtcccctgatgaagtgacattgtttagcggggagacagtccccagttgtaacgtggcatggtgcgctagcagaaaaagctgtggtgcctgctggtactcggccattttcatggcgagtgttaatgcaaaccaatccgcatatggccctgatttcccaagccaatgggggacgaactgctgatcctgtgttgccgacgcgctctgctgtgccgatgatggcaaggctttcaatctctgatttaacccaattaacagcctatctttctccggtgagtcatcatcgttgtaccacagagtcccggcagtgatggcaggacgttgataacgcagaaactgggccatactctgctcagcctccgcggctaccgtcaccattggccgatgcagacagcattttgccgacaattgataagaggacggtgccagtagccaaaccaccgcgccctcactggttgccgccggcgttttattgccttcccaacaccatgtgatgaccaacagcaatcctttggttttcgtggtcaaccagtcgcttatttgatgggtataatcggctttgagttttaccgggccttgtagctgagacataggcagccccagttttttccatacctgacataattgctcccatacgaccgctttgggactgtctaatgaaaaatagactttct

SEQ ID NO: 4500 - DNA, 764 bp, Photorhabdus luminescens
cgatttcgataccaatcttttccgtaataaaatcgcaaacacttttgctacatctgcggctctttttgagactgtcggtatcgacgagcaatttagcctttttaaatttagcctcgtagaccgtgtaatctttgtgaagactagcgttcacattaccatctcggcttgtgtcgaatgtgtgttggaaaaaatcgccaacaaaggagacatttaactcagcggcacttatggctagcagaaggttaaaatcatgcccagcaaagtcctgaacctcatccacgaagaaagcatcaaaatacttctccatacgcgctatgatcgcaccaaccagatgagattgctcgatgaatttggcaagacggttggcgtaaacctgacgattggttgacacgtaacgccggtcgtcagtcaatgcataccgtgggtatgccaagggaagtttgaatgtgatacctatggtattcttatccgatcgtagaaatggccggtagcaaaaaccgtgtaaaaatttgaaatacgtgtagagagtaatatttgctggaaaggtacccgattcgatttataatttttccacgcaaattgctgtagttagactctgtataagtaacgataagaaagcgcttctcctcatcaaggctgggcaacagacgggatgtcttacccgatccgggcacggcaaatactactctcttatccatgtgattgcctgctgaatgtaattgggcgccgacagttcggttccttttgttcgagcaattcgatgc

SEQ ID NO: 4501 - DNA, 668 bp, Photorhabdus luminescens
tgtcgacattcgccgcaaggtcggggtgattgatatcaaatatttcaggcgcggtggcaaacttaccgcccggctcgaactgaccaatgcgtacgcccttgccggtgtagtccttccagaccggcagaatgttggcatcgctcaaataccattgttgagcagctaatggatcgagcgggacttccggggtcaataatgtcgcaacggcgcgcatcggcgcggtttccccactgctgagatcgactaccgatgctgacggattcccggctgcgtcagttaccccatatttaaagctaatgacaccggtgtaatctgcatccggcgtaaacaagacatcgccctgagctgtgaggctgaccgtaccgcctatcgcatccccaacattggcaatgcgcagggtaccctgactgttaaggtgttgatcgttagccagcagactttctgcggcaatcagatgaggctgagtacgatcaacaaccttgccgtccttgtcgtgagtgaggacatactcgacaggcatgcatttgattgtgtgttagtaaatcacccgccgaatatctgaaaattgaggttttgatatttttcagcgtaccgtgccgcacgctcgcgacttatcggccacaataccactgtcggacggtaattgatatcgcgtgttaccggcagct

SEQ ID NO: 4502 - DNA, 776 bp, Photorhabdus luminescens
  misc_feature (590)..(590): n is a, c, g, or t
aagcttatttcaaggattagaattttttcatgtttattaagaatggacgtattgactgatatctttgccgaatcgactattaatgaaaagtgtgtagaaaaacctgtttaccttatcctgttctcccggttttatagagagaagtttattggaaacaggttgttagaaaataaatttaacatgtcaggcgctttcaatagagaagtgatcgataaaacatcattattatcatcgtatacccgctcaagttcctgagtagcaaatgcggttgtcccgaaggcgagtgcaagaggggtaatcatggataacaacatgaattcggttgtgccaacgagaatacggtgactgaaaggataataaaaacgtgtattttgttcatcaagaattctttaataaatgacagaattttacatgatgatcaccgtattgaatacatgaccgaaaaaataataacaataaattcaaatgattatgtcaaatgaatctattggaaagcataccaagtttgatacagattttatcacaaaaagcaacaaataatttacagtcttttcaatgggttatatttttagttgtgatggtgcccacanatatattaactatcacatggctaaattaaaaaaactgttattattaggatgctgaattaaattttaatccagtttatttgtcaaaaaaatcctagaggaggataaaatgaatgtgataacagcacaagcatttaggccactaactaatgatgaaacattgaattatgataatggtttaatgaattc

SEQ ID NO: 4503 - DNA, 684 bp, Photorhabdus luminescens
  misc_feature (523)..(523): n is a, c, g, or t
  misc_feature (682)..(682): n is a, c, g, or t
tgcacgatgagcagtaccgaatgcatccatgacataaatatcacacagggaagcatattttttggctaaggtttcgtcgtctttcttctcacctttattaaagcgaacattctccagcacaaccagttcaccttccgcgacatccacgccttccagatactctttttccagtcgaacgggggaagataatttctcttctagatagtctactactggtttcagcgagaattcttcactgtattcgccttcagtagggcggccaaggtgagaagtgatcatcactttagcgccctgttttaatgctgcctcaatggtcggtaaggaagcacggatacgcgcatcagaggtgactttgccatcttttaccggaacgttcaggtcagcgcggatcaaaatacgcttacccgccagatctaaatcggtcatcttaattacagacatggtgaatcctctcattgattctctaaattatttaatcttgcgccgtgtgcggatctatatatggaccgtcgatcaacaacanatcatttgaaacccatagcagccattgctaacgttgtatccaacattcggttagcaaatccccactcattatcacaccagactaatgtcttaatcagatgttgcccactgactcgcgtttgtgtgccatcaacaatcgcgctgtggggatcgtggttanat

SEQ ID NO: 4504 - DNA, 787 bp, Photorhabdus luminescens
  misc_feature (668)..(668): n is a, c, g, or t
  misc_feature (769)..(769): n is a, c, g, or t
  misc_feature (787)..(787): n is a, c, g, or t
aagcttctgacgtcaacgacgatttcaagatcaagttcactgaatgttttgtagacttcaacggcttcttgcttggcagcatcacgaacagcctgttctgcggctctttgttcctgagctgctttactacgccatttagcactgtggatacgcttcatagaagggcggtttgtttcggcggatttagcaagccacagcgctttttcttcattatctaaagctactgctgctttttccaatgcttcctcgtgctgggcctgaagggaacgatgatcaatacgttctgatgaaccagcagcagcaaggaagctgttcgccatcgatgcccatgattcacgccacaacacagacatttttctgtcgttccagcttctttcttttttaccaaaaccttccgggccaatggtttttaatgtcaacataacgtgagcgtgggggttatcactatcaagatcatggaaagcgatatcagcaatcatgcttttatcaacgaaatttttctgacaatactcaaggacaagttttttcttatcatcattgtttaactcggtaggaatagcaacatcgaaataacgagctgtttgtccgttattttgacgttcaactctttcaacttcattccacaatgccgtggagtcctttacgatatgttgaggagcattaacggnggctaatatgaaatgcccgcataaatcagtacggcggctataatcataggtatcacctgttctttcatctgtgattctgcaacgggcatgataggcagctntagcaacggaagacttgn

SEQ ID NO: 4505 - DNA, 700 bp, Photorhabdus luminescens
  misc_feature (601)..(601): n is a, c, g, or t
gggtattacaccgcaagcaatgattggtcatagcctcggtgaactggttgcggcctgtgtagggggtatgcttgaactggaagatacactggcattggtagcaaatcgagcggcaatcatgcagcgccagcccacaggagcaatgctggcggtacaggcatcatctgaacgtatggttgcgctggcaccggagtgtgaatttgcagcactcaacgggcccgcacagtgcgtgataactggcagccatgacaatattgcggtactggaagaacaatgcaacaaggcaggtatttcttgccagcgactaacgacatcacatgcatttcatagttcattgatggatgctgccgcacaacagatgcgggaattcagcgcaggcttcacgctacaatccagtaccattccgatgatatccaatatcagtggccgttggttcagtgaacaagatcgcgataattctggttattgaggagatcatctgcgtcggccagtacgcttctatgacggtattcttacgttactgaaccattatgacaatccgatcctgcttgaagtcggtccagggcgtgcactgaccagtatgctgaaagatctacagcanacaggccaagcccagatactaaccacgatgcgccattactcgccagcaaaaccggatgaagaggtgctgctcaataccgttgggcagttatggcagcaa

SEQ ID NO: 4506 - DNA, 789 bp, Photorhabdus luminescens
  misc_feature (497)..(497): n is a, c, g, or t
  misc_feature (636)..(636): n is a, c, g, or t
aagctttctacagcataagtgctttaagcgagcgttatccacgtctgggggtgttgcagtttgatgctcatcctgatttgtatgctatggggactccctgcgatttgcagcttagccatgctaatgtcatgcactgggttcgtcgtatgccccatgttgcatcaatttggcagattggtattcgggattatttttgtcaacctactgaaaacctccagttagaagtggatcctaagttccatatgctctcggcttttgaagcagagaccgtgggctacgagcgcctattcaggaatatggatcgttctttaccttggttcattagttttgacgtcgatgtgctgtttggtacggaagtaccgcagacagcaacccctgtactgggtggcctgaattactatcctctgttggcttgttttgagcggctgttaagcgagttccgtattggtggtatggagtttgtcgagattggtgatgcttcgcaaggtgcccacggngcagccgcagtggctgctcggttgcttagtcgctatctcttccatttgagtaaggcgatggtggccggccattgtatctattcaccttttcatcaaaggtgatcgttggcgcttttgtttttgtcacgaagaaacatangcgcaggatttttagcatgtgtatctccctagtttttgggtcttaatattgaagcgtgagttgattctgtatatcgatggtgagctggaaagaggagaatattaatcagacaatattgattggccttggtgcctgaatttgctctttctataa

SEQ ID NO: 4507 - DNA, 685 bp, Photorhabdus luminescens
ccgttctgttattcctgtccggtgttatcagtgttgttatttacgctatcgtcaatagcccaagcatcggtctggttgaagaacctctgatgaacaccactcacgccattctgatcattatgttgagtgtcgcaactatcacaacgatgttctgttcagttgatactgacgccattctgaactccagtacctttaaagcgggtatgagcgcatgtatctgtattctaggtgttgcatggctaggagatacttttgttcaggcaaacatggattggattaaaggcaccgctggagacttaatccactctcaaccttggttgctagcgatcattttcttcttctgttccgccctgctctattctcaggcagccaccgcaaaagcgttgatgccgatggctttggctcttaacgtcacaccattgaccgccattgcctctttctcagcggtttctgggttgtttattctgcctacctatccaaccttggttgccgcagttcagatggatgacaccggcaccacccgtatcggccgttttgtattaatcatccattcttatccctggcaccattggggttgctctagctgttgccttcggtttcctattcggcagtatgatcctctaattctggctggccataaccacttaatccaggggcgtataccgtccctgacttccctctacca

SEQ ID NO: 4508 - DNA, 781 bp, Photorhabdus luminescens
aagcttatctgcacgctcaacaagagaaaggattactgcgtttcctgacgtgtggcagcgtggatgatggcaaaagtactctgattggacgcttgttacatgatacccgtcagatctacgaagatcagctttcaacattgcagaatgacagtaaacgtatcggtacccagggtgaaaaattagatctggctttattggtggatggtcttgctgcggagcgcgagcagggtatcaccattgatgtggcttatcgctatttttccacagaaaaacgtaaatttatcattgctgatacgccgggacatgagcagtacacccgtaatatggcaacgggggcatcgacctgtgatctctctattctgttgattgatgcgcgtaaaggtgttcaggagcagacccgtcgtcacagttttatcagtacattgttaggtattcgccatttggtggtcgcggtgaataaaatggatctgatggaatatcgtcaggaggtttttaatcagatcaaacaggattatatgaatttcgctggccaattgccgacaatttggacgttcattttgtcccaattctggcacttgatggcgataatatcgtcactataagtcgtaatatggattgggatgaagggccaacgttgtggatatccttgaaacagtgatgtaaagaaggaagccttgaagcagttactgcgtttcccggtacagtatggtagcccggactgatctcgattttcgtgggtacagtggcacactttcatctgggattctacgtaaagggcaga

SEQ ID NO: 4509 - DNA, 693 bp, Photorhabdus luminescens
  misc_feature (453)..(453): n is a, c, g, or t
taaatcaatggcttaatattagaaagagttggcgagaatcagattcagagtgggtctttttatcacaaaaatcaggggctatttcacgccagcaagtttatggtttattaaagcgttatggcaaacaagcattagtcaatatttcacctcatccacatatgctaagacatgcctgcggttatgctctcgctgatttaggaagagatacacgccttattcaagattatcttggccatcgaaatatatcccatactgttatttacaccgcaagcaatgtaaaacgatttttcaaaatatgggaggctcctgcaaaaggactcgattaatttcaatatctattttctatgtaagacatgtagtatgagaaactatttctctcggaaacaaaaacatcatccaatcgtccgattataaaaatccttatccatatactgatgaggttttttatacganaaaataattattcacatcataagatactacctattatttcttataattacttttaaattaaattcaatagaaataaatagcttgcatttacaaataaaaatatatttttaatggatatttttggagcaataacccatcataagcagcacaacaagatgaacaattcccattggaaataaaatgacaatgaacataccagggccccgtacacaagacaaaacagtactatcatcggttttg

SEQ ID NO: 4510 - DNA, 845 bp, Photorhabdus luminescens
  misc_feature (6)..(6): n is a, c, g, or t
  misc_feature (11)..(12): n is a, c, g, or t
  misc_feature (29)..(30): n is a, c, g, or t
  misc_feature (37)..(37): n is a, c, g, or t
  misc_feature (43)..(43): n is a, c, g, or t
  misc_feature (45)..(45): n is a, c, g, or t
gctcgnggaannttccagtgaagcactgnngctgggngtcgtncnagaacaacctgctcgcttgcaagcttttattaattccccaattatgttcatcccgtagcatgtcaaaagaatagagttcaggattatcaaagcgctgacatacctcaccaaaaactgaatcgaagtccttcccacacgatgcctctgaagaaaaactattccaggttttttgagcatcaactcgtaaagacaatatgtttactgcttgcggacgccccatacccgatatcaacaaattaggcatatgaggatataaatattgcaccgtgttatgcatctgactgatgctggtttgtgatattggaaacccttcttgttttaataaatctgtcaattctcgttgtgagatcggtcttcccaaacatttctcatgcatagaacttgcgttaaaaacaccaagcgctttctctataaacgttaaatccccccgaacatcattttctgccagatgcccaatgacacactgcaaccgaccaggccagggtttaaacaaacaagggattcggaaaaaacgttcctcacccgtttctttccataattcacataggatttgggaacggggattgcctccatcactgaaaatggaaacatttccactggcttccggatctcgcgtcatttcggtacagaaccagtcctctggcacgaacagaagcttaatatcgtcaaaacggggattacggctgaggcgaggttatcccgggtttggctgtaactcatccacgttataccattggcacttctgccctatgcaaacaacagactggttgcggatggggtgcttgcccccttgaacatca

SEQ ID NO: 4511 - DNA, 690 bp, Photorhabdus luminescens
tgaataaagcgggtgcaccgacaatatcagaaatattctctgtcacggcagcatccccgcaaatgattgtttcaggcaatcccgatgtttctgctacgcctttatcaaccgcaatggacagtgttctgccttctcagagacgacaggaagataacccgatgactgaaattgtttcatcagccgtgaggccggttgatgagatttcttctgccgtcatgacagtcgcaccggagaaagggggacagtcggatgggagcacgcaacagctattgtcattaatggggatgaatgtcgcgggcacagtgacagaacagattatggcgagtgaagcggaaatcgtaccgccatacacatcaatgccttcacaacacgcggttcaggcaacatggcagaacgaaaatgcgattgagacaccctgtattggagagcaattctgggactggcctgccgctggattaagggttggggtaatgaccattatacgccggaagtccggttcatctgggcagggtttcgtggttgcgagtgcgctggtcttttcctccccctccttattaccaaaatcaggtggatggcaaggaggtaaccaaaaatggaaacgggacaaaccgatttgatccggtgggacgaccttaaatcacggcggaacgcatcctggttgtgtcatcttatgattccgctgaccgaccg

SEQ ID NO: 4512 - DNA, 785 bp, Photorhabdus luminescens
  misc_feature (549)..(549): n is a, c, g, or t
  misc_feature (601)..(601): n is a, c, g, or t
  misc_feature (709)..(709): n is a, c, g, or t
  misc_feature (765)..(765): n is a, c, g, or t
aagcttgaaattgataccgctttgagacgccaaaccatcaatcccgcaggaaatatgattaatgctggcactaaagccaaacccgccaaagcgccttcatacccaccaagaacaaaacagagataataggccatcacgccaatcacgctaccaaaaataatcgccagcgcattcctctgtgcatctcggtatcctttcaaaatagccaaaaaatagttggcaaaagcaatccccatttgaataaaggcgagtgcctgcacaactgactcataatcttgatggccgaataatcccgtactgatagacccgctaaacagcaaaaaaatcaccgccaacagcgtggaaaacccaaggataatggcagaagatgttcccaataccgcacgcaatctttctggctgctgctgatactcagcaacatatttcgtcacaccattaaaaataccggcaccagccaataccccaagcacagtaataagctgacggaaattacccgcctgcccaaccccgctggggccaaaagcaaccgccagtaatttaacgattaanagccctacaccgatttttatcagtgtagagcccgcagtccatattgatgctntagccaacgacatatcaggcgaagtattcccgaatatgtttgatgacaatctgctgttcagcgtctgttatgttgtaaaacatcggcaagcgcactagacgatcactntcacaagtagtaaaacaatcttccccatgaaaacgggcaaatttttcaccaccggngctggtgtgcagagaacata

SEQ ID NO: 4513 - DNA, 690 bp, Photorhabdus luminescens
  misc_feature (667)..(667): n is a, c, g, or t
atatttaagttttatgtcgtaacagcgatataaatcaaagagaattcggtggtgcggtagttcagttggttagaataccggcctgtcacgccgggggtcgcgggttcgagccccgtccgcaccgccaccttaatttaggggcgtagttcaattggtagagcaccggtctccaaaaccgggtgttgggagttcgagtctctccgcccctgccagttataagctaagtggcaactaaggtagtttatagtattggtgatccatatatgctacttggattagattattgataaggcgctggctttttggtcagcgcctttttcttaatggaactttgtaagaaaaacggatttgccgttacattaaaaatccccttatgcgagccttttctccagaaatgatctcacttggaaaatttgttcgcaaatattgtctggttcgtaaagctaatgttgccattgatttgaattcatcatttcattgatgttgttacacatttttcagttctcaatgttattcgatcttatagcaataaaacctttctttctattatctattgcaaagtgaattctatagataactttttagactttttggcattttcatactagttaaagtccttctgaactaagtgtctagaggatatgtatgaatggatcttactaatatnttgattgtgaagtttcttcttag

SEQ ID NO: 4514 - DNA, 762 bp, Photorhabdus luminescens
agcttgcaataaatagtacaccaaaaagaacaggtagataaaataaataactgactttattactccaatattattatcagaataactcactgccaggatttccctgcatcccatatttgaaagaggaaatcctggagatttgctaaccaacacacactccatatataccaagccataaatgaaacaaaaattctaatattctattttttctgttcttacctctgaatggtacctaactcattataaaattaaccttatataacgagatgttacctaaaaacccttatcagatcacaacttggaactaatgttttcatttaagttgaaaatgaaacaaatatttcctataacaggtatacgacaataaccaaggctaactggcaaacactaaagaattgactgcaacaatataccctatggatttcaagatgcatcgcgacggcaagggagcgaatccccgggagcacagataacgatgtgaccggggtgagtgagtgcagccaacaaagaggcaacttgaaggataacgggtataaacgacctatccgctttcttctattccgagaaccactatatggaagagattcgtatcgggcctatcggactgtttcatcggacggacgcatgcctttgcttaccacaagcgccgactgttttccctctggcggcaaactagcttgggaaatggtagcggaagttgtgctgaacttgccggaaccgtccgagcatcatggtgcggcgttcactgataatgggccaata

SEQ ID NO: 4515 - DNA, 698 bp, Photorhabdus luminescens
  misc_feature (298)..(298): n is a, c, g, or t
aataccgtgacttgattgataccctatttctcattaccactgtaataattttgggtgaaaataggatgatttttaggtattttgttgtgaaatacacagaggcaaaattttggtaaagcgaatgaacggaataaattaaaatacactggttagggtgatgaattcaaagctggagtatttattagtttatgatgtacaagatcatgttttcgagctaaatttagcagacaaccagataatcattttgataaggtaggtaagagcctatgaatgaaaatggattgagtcgatttattgncgattatattgaaagccgtaaacagtcaaagttggaggtttttgataaagaggctgaaaaaaaattggcaaaactaacctctatggaggatattacgccagttaaacaaaagttagctgaacaacgcaaggaattggaagagccactatgaagttagaaattggcctggatgatgcagttagccgagtatatcaaatccgcttagtgacacatgttcttgaaatttgcccatactggtgcaagaggtagctccattttttccggtacaatcaaaaccaaatgtgaaagaagattttaaatatcttctccttggcagctttatatagacctgctatttatgcggcaggaaatgcggctggtcttgatatttcgaaattattattgacagaatatcgtgaag

SEQ ID NO: 4516 - DNA, 764 bp, Photorhabdus luminescens
  misc_feature (453)..(453): n is a, c, g, or t
  misc_feature (502)..(502): n is a, c, g, or t
attcaacttcgttacgtgtgactatgacggaaattcttgatcgtcacccatcccccggtcgtgatcgcagtgaggatctttattttggtgtgctaagtttccccgtagagagccacattatttactaccgggaagttccgacgggtattgaagtgttggcggtgttgcatcaaacgcaagatccacataatcatctataccctatggatttcaagatgcatcgcgacggcaagggagcaaatccccgggagcatagagaacgatgtgaccggggtgagcgagtgcagccaacaaagaggcaacttgaaagatgacgggtatataatgaagagcataaaacgtgggatactttatttaattcgcaataaaataagcagctaaacttttgtatcagatgcttgagtgagttacccgagcgccgttttcctcagaaacctgagttgtcgaactatntcatccggttctcaccaaaatcccggctggaggtcaggataagttgttnttgtaggacgaatgaaattcaaaaaaatccctgcatgttcaccgggggattggtatatgaaagagagcggatcttacggatatctggtaaattctgactacaagacctgtttgaacacaattgcggtggacatcttctcaaaacctggtgggatgagcctgagtatggtttttaacacttggacttgtcgtctttaactggccggaacgctccctttgggtctgtggtcgtgttctcccacgtccgtgttcctttgagcggc

SEQ ID NO: 4517 - DNA, 694 bp, Photorhabdus luminescens
  misc_feature (492)..(492): n is a, c, g, or t
  misc_feature (645)..(645): n is a, c, g, or t
taccgccgatggcaccaccaataccggcagattctaccgcctctttggctatcagtgcacctttttcccaagctggcaacgagttatacaacagccctaaatcgttctggttttctgtcgtcacaaactgactgatacgatgggaatcttcttctgataagccaaacatccatctcagaccactgatggcatccgctgtttttattcctccttccatttcagcctgataggtcagtgtgcataacccaccgttcccggcacagtgagacaacatttctgcccgttgtgtagcgctcagtttgttgtatttgttccagattgcttcggtaggcgttccttgcttattggcttcctggagttctctgaccagattgtaggcattcatggagttcaggtggttaaagagaataacaatttccccggcattagctccactgttagcccctttggcgctgttggtcgcaatggcccctgcgacgctgccaatgattntgccacctgcctgaattttcattggatcattgaatgttttatccaatgttatcgcggccagttctgcggctaatgctccagccgccgcccctttggcatcaccgccgccaatttccgcagcaagagcagaaaccgccgcatggctgatagctntttcgggtaaatctaacacctgaccgttagccccaatcaacccggcact

SEQ ID NO: 4518 - DNA, 772 bp, Photorhabdus luminescens
  misc_feature (719)..(719): n is a, c, g, or t
aagcttaatatgagtttaagattgctccctgctttttctactaatagtgaaagccaatgttttccagaactgatctgagcagtaatgttgttaggattacccatccactcatttgctagagttactctaatactacgtactcctttcgacatagcaaataaagacgaagtaattaaataaccggacaaaactggaacatcattaggagttgggctaaaaagtcgaataccgttttcaggtaattcaatattatctgagtcgcttaatagtattgctgatttccagctatcgttatctttccgataccaacgtagatcggtgagttttccctgattcgccagtaaatcagcatctgatgcatattgtaatgggtttccagcgctatcttgcccggcatcaaacagggttcctttagggataagatattctgcattatctggatttaaggtaatgcctaaagcaacgttatccgcttgggcatttctgggttttaaacctaataattcccgataataaagatcacgatgtcgtgccggaaaagtattaaataaaactttggttgtttctaacagttttaaaaaagctaatataaaagcttgatgagccggtaaatgtccatccgctttattaatggtttggtaaatatccgctaatttttcaggagtattttcctgaataaagtagaaactggtccagaatttatttctatcttgatcaanagggatctttgccgcatattctttaagccagtttaaaatatccagtgtactca

SEQ ID NO: 4519 - DNA, 686 bp, Photorhabdus luminescens
tgctatggcaacggctgagccataactatgtcaatggtgttgaggtattgcgagaacttggccgccaacaaaatggtgaaactcaaagcagacaaccgctgacgccggtggttttcaccagcatgttaggaatggcgcaagaaggcgtcgccatcaaacaatcgatcactcagttactgggagacccggtttttgttctgagtcaaaccccgcaagtctggctggatcatcaagtcatggaagtagatggcgatctactgtttaactggtactgcatggatgatgtattagcaccgggggttattgaggcactgtttgccgcttataatgcgctgttagtgcaaatttgctgccagcctgactgcatagaacagtatgatcttcatatccccccttccggtcatacccgttatgacttctggccgcaacaacctgaattgcatcaagctgaacaatatttgcgtgccaaacctgaaatacggttggcagaaattcagccacgtcaggatgacacgcaaggttataacttctggctggtggcagaggacaatttgtcattatcgctgccagaaccattagcgataaacaccgataagttaccgctgcctgagttaactgaacaacaggcatttgagcgctcttggcagcacattgagcagcaagcgttatttggcctgagtcagact

SEQ ID NO: 4520 - DNA, 773 bp, Photorhabdus luminescens
  misc_feature (72)..(72): n is a, c, g, or t
  misc_feature (365)..(365): n is a, c, g, or t
  misc_feature (367)..(367): n is a, c, g, or t
aagcttgcatcctgatatcaatctgtccgtcgagtacgggtgagtcagcagtactttgcatatacagctcanactcctgcaccagaaactgacctatccgcctggaggtggctagcgcatccggtgacgccatttttaccaacgtatgggccacttcggaatcaaaacgacgaccaaataagttgtcaatatattgggtagttgacttttctctgtgagcatcagcctgtaatgacagtaccaaaccatgtaactcagggtatgcctgtaactgactggcagcatcatcaaataacttgatagtttccttcgaggtgacttgtccggtgagccagagtcccctggcccgtccaatcaaaaacctngnttccgggatattcgcggtttccaatcggctcataaaagcaatcagactttcactttcggtcttaggcgcttcccgttcagcggttgaattcgttcgggtcaacggggtaatctgccattcaataagacgattaatttcgttttgtgttataccgccttttaaaccgacaacacgtccggttccatcaaagatgacgcgttgcgtaagatgttcagcatgttgaggtgccacggcgatcccaatgacgccagcggattcagctccctgagcctgtaagtgctctatcattcggcccattttataacgtactaagttcacctgattcgagcgtagagcacactcccttgagctatgctgttgccattagctttcgccgtccagcagaatatatgcttttatctaaata

SEQ ID NO: 4521 - DNA, 688 bp, Photorhabdus luminescens
  misc_feature (131)..(131): n is a, c, g, or t
tactgtccgcgggaagctggatgttcaaaataaccgctgtattcgtcaggtacagtggttttttgtttgatcaatttgtttgatcaaatagcactgagcgcaggcccttccttcagataggggataagtanttatcggagtgtgtaaacttgacgttaaacactccgaattttttgacattaagtggatgtcccgccgtaaccgaatagcggctggcgtagccagagggcggggagataccctcttgtatgatttaaagggatttttgatgggaaaagcatctaatagaagtgcagtgtacctctttacaggaagatattacgacgataatggcggtaatcgtattactgctgttggggctggtggtgaagtttatgcttatggcggacatgatgatgttaccgttggttcatttaaagtcgatgtataccatacagatggcgaccttacggtatagggagtgtcaggttataccgttattcataaaacgggaaatggcggtctgttatttacggaggctgtcgttgtatctgttattgttcacacggttgaaacgggaaatttaattattcgggtgcggccgggtttattaaaccggtcccgaaagggttgtctggtgatactcgattaagaggggccggcggatacactgagttatggcctgaaactaacccgggaaattaaattt

SEQ ID NO: 4522 - DNA, 667 bp, Photorhabdus luminescens
  misc_feature (519)..(519): n is a, c, g, or t
tcagcgtaaatcaaacttgtcgccggtgataatgaatagatagtaagtcgctaccaatgttgagttatacccgttatctttcaagttgcttctttgttggctgcactcactcaccccggtcacatcgttatctatgctcccggggattcgctcccttgccgccgcgatccatcttgaaatccatagggtatatactactctcacagcataaacaccttattcttcttaattcattatcactttctcatcaaatcccaaaaacgccaatcagctactctcaccaccactgatgaaaatggtgcacaggcccgattccttttcctacctctaacgagtccgcctgttctaacgccgcctggaggtatgatttggcaacaggcagggttgtttgccaattcgaataacgcggacgcagagcagccagtgcggcggaaagcgtacatcctgtaccatgagtatgaccaggattaattctcggcgcagtaaaacgcattcttcctcacaataaaaaaccatcanggtcttcatgttctgaaagggcccgctttcagtaaacggttccattctaacgatatagttcacccctggttttgcttgtccgttaagttctgctccgagcatgccatataccgggggttcggcaatttggggtatcaccaaactttgt

SEQ ID NO: 4523 - DNA, 678 bp, Photorhabdus luminescens
  misc_feature (372)..(372): n is a, c, g, or t
cgctcattttgggatatgggtactataattggcgtaactcagtccttttagtgatttttggcgattgatcagaacgccaaaattggactaagctcccttcaaggaatctattattttgaaaaattatttaaatttcttgatataatgttacataatacatttgcctataaatcggctgagataaataaacatcatcaaactcatgtttatcatgcagtactttgtccctttcagccttagctatttcatgttgtagaataatagctacttcacttttatttaatttctcagaaagaattaatggaagattaaatttcacccaagactatcgcctggaaaatctttcctcgttaagctggtggcatatcactntgacaagtgacttagatttgacaacggaatcatctcgtagaaatattgcataatgagattactcatattcaagccaggtaactatttgaggctatgcatgcccaagcgtacagaaaaacaggaaacaacccacatcagccgaaaaggtatcccaaacgcctttggaaagcaaattcgttaccggaaaaaagcgatttctctgacggtcagagtaggaaatatatccggactattcctattatcgctcattttatccgtgcaacgctgagtttttatgatcggatgggtaatcagtttcgcgccgga

SEQ ID NO: 4524 - DNA, 673 bp, Photorhabdus luminescens
  misc_feature (57)..(58): n is a, c, g, or t
  misc_feature (62)..(62): n is a, c, g, or t
  misc_feature (66)..(67): n is a, c, g, or t
  misc_feature (77)..(77): n is a, c, g, or t
  misc_feature (82)..(84): n is a, c, g, or t
  misc_feature (94)..(94): n is a, c, g, or t
  misc_feature (109)..(109): n is a, c, g, or t
  misc_feature (120)..(120): n is a, c, g, or t
  misc_feature (125)..(128): n is a, c, g, or t
  misc_feature (134)..(134): n is a, c, g, or t
  misc_feature (143)..(143): n is a, c, g, or t
  misc_feature (151)..(152): n is a, c, g, or t
  misc_feature (167)..(167): n is a, c, g, or t
  misc_feature (170)..(171): n is a, c, g, or t
  misc_feature (174)..(174): n is a, c, g, or t
  misc_feature (185)..(185): n is a, c, g, or t
  misc_feature (217)..(217): n is a, c, g, or t
  misc_feature (221)..(221): n is a, c, g, or t
  misc_feature (230)..(232): n is a, c, g, or t
  misc_feature (235)..(235): n is a, c, g, or t
  misc_feature (248)..(248): n is a, c, g, or t
  misc_feature (250)..(250): n is a, c, g, or t
  misc_feature (267)..(268): n is a, c, g, or t
  misc_feature (275)..(276): n is a, c, g, or t
  misc_feature (299)..(300): n is a, c, g, or t
  misc_feature (302)..(302): n is a, c, g, or t
  misc_feature (310)..(310): n is a, c, g, or t
  misc_feature (318)..(318): n is a, c, g, or t
  misc_feature (320)..(320): n is a, c, g, or t
  misc_feature (322)..(322): n is a, c, g, or t
  misc_feature (324)..(324): n is a, c, g, or t
  misc_feature (330)..(330): n is a, c, g, or t
  misc_feature (332)..(332): n is a, c, g, or t
  misc_feature (334)..(334): n is a, c, g, or t
  misc_feature (347)..(347): n is a, c, g, or t
  misc_feature (352)..(352): n is a, c, g, or t
  misc_feature (360)..(360): n is a, c, g, or t
  misc_feature (367)..(368): n is a, c, g, or t
  misc_feature (387)..(387): n is a, c, g, or t
  misc_feature (406)..(406): n is a, c, g, or t
  misc_feature (508)..(509): n is a, c, g, or t
  misc_feature (591)..(591): n is a, c, g, or t
  misc_feature (621)..(622): n is a, c, g, or t
aagctttctttggcttgtttgatggcacgacagatgataaatggggctggttagatnnagtnaatnnttaatagaantatannnaatggatttnaagagggattgtganggtgagggagngaatnnnngggagnatagagaantatgtgannggggtgagtgagtgnagnnaanaaagagggaanttgaaagatgaagggtatataaataatttaangggnggttagttnnntgnttgttttgataanangggagtgaagataatgnntaagtanngttttggaattaagaattatggnngnaatatggnaggagttngngntntatggngngngaaagggatgaangatgnagattttnggtaaanngattattggagtagttaanttatttaataagtttggtnaggggatggttatttgggggattaaggtaaattggttgtggaaaagatggaagattagggggggttgaaaagagttaataagatagggggggagaagggatnnaatggggaagggggtattggttatttttggagtaagtgattggatggtgattttgggaattaaggggatggaaatgggggangtttggggggattgaattgggaaaaataanngagatggggagggagattagtttgaaattgggggatttggttggggggaga

SEQ ID NO: 4525 - DNA, 712 bp, Photorhabdus luminescens
  misc_feature (40)..(40): n is a, c, g, or t
  misc_feature (106)..(106): n is a, c, g, or t
  misc_feature (415)..(415): n is a, c, g, or t
  misc_feature (499)..(499): n is a, c, g, or t
  misc_feature (573)..(573): n is a, c, g, or t
cgatagcttggttagggtttaggaatattttgaaatttgntgatatcatattggtttccttattattgctgttatttgttggcatatataatcaggtgatttcacntgtgacatttaacttaacactttctatgagcagttaaatattgaaatttatcagtgacgtaaaaggaataaggtaaacgtaaaagcggttaataaacattgcatgctacgcattgcgtggccttttctttgttcacacacgtttaacggggatcttaatccttaaggtggggtggaaagatgaaattcatggcaaagatcgatcgacatttggatgaagctctgactatggttgttatgaagccatgagatacgaatttccctactgtgggcggggacctgtataccttgacggatttatcggtcgatngcggaagtcagagataaagcgacgaaagattccgacccgtgcaataatacattatcgaagagtcggtgaatgacagaacgtagntcgactaaaggaggatgatgacggtaggtgaaacgggtgttgtggcacgttgagatttcgagtgtgaggcgcgncgatttaccacagctatatcttacgggggaagtgctatttggtgtaaaaaggaggacgttagattgattatgcattatacgtgtatgcgcggattgttagattttgggttaacagtgcgggttcggcagcaagcgatca

SEQ ID NO: 4526 - DNA, 695 bp, Photorhabdus luminescens
  misc_feature (107)..(107): n is a, c, g, or t
tgatgaaaaaatatgatctgcgtgacacgcctgatgtggatgaccagcttgcgtttctctctgctcaggaagccagtgcgccgtttgatcttgcccgtggcccattnattcgttccagtctggtacaactggctgacgatgaacacgttttcttgctgacccagcatcatattgtttccgatggctggcctttagggatactaacatcagaattggaggcgctttattcggctcactcgaatcaacagccggattcgctgccaccgctgatcattcacttccctgattacgccgcctggcagtgtcaatggttgtccgtctgacccctccagttccaatctgattatcggctctcgacgcctgtttgatcctccggttctccccggatttcccgactgccctgccacgtcccactcacctttcgttcgcccgggcccttattgtcccgccacttcggattcggagttacccccatccctttatgcccctgagttagtccacaagctgttatgctttccttcgccctgcttgctgtccgcgccatcacttttttacttctcgccgtcccccgattccccgcgtgtcctacccaacccacgcccgttgtcttcagaaacttaccttttctattccttatccattccctccccagggttccttttcccttccctagcatcactctaccccctcccact

SEQ ID NO: 4527 - DNA, 698 bp, Photorhabdus luminescens
  misc_feature (23)..(23): n is a, c, g, or t
  misc_feature (107)..(107): n is a, c, g, or t
  misc_feature (113)..(113): n is a, c, g, or t
tctttggcttgtttgatggcacnacagatgataaatggggctggttagatccagtcaatccttaatagaactatacccaatggatttcaagagggatcgcgacggcnagggancgaatccccgggagcatagataactatgtgaccggagtgagtgagtgcacccaacaaagaggcaacttgaaagatgacgggtatataaataacctaacggacggttcgttccccgcctgtcgtgataaccctggagtgaacataatgcctaagtaccgttctgccactactacttatggtcccaatttggcaggagctcgcgccttatgcagcgcgacagggatgacccatgcatattctcgtcaaccgattcttgcagtatctcactcattccctaatcctggtcccgcgcatgttccttttctggacttacgcaaacctgtttgcggaacagcattgaaccatgtttcccgtgttcgtaaacacttcattaccatcaccggcgtatgaccgtttcctacttgcagcttgctgctacctcctttcctatgccataacccgaatctccgccttttcccgcttcatactttcgcaaaccgtccattgagcgcacgccatggtgccttttatacacctccacctttcaccctcccaccagctattcgcatagttccgtacacattcgtctttctacctcctccttct

SEQ ID NO: 4528 - DNA, 763 bp, Photorhabdus luminescens
aagcttcagcaatgagctgcatatcaccgtattcaataccattgtgaaccattttcacataatgaccggcaccatccgggccaatataggccacacaaggttcaccttcagctttagccgcaatctcttgcagaattggtgccaccaatttatacgcctctttctggccgccaggcataatagatggacctttcaatgccccctcttcaccaccggaaaccccagtaccgataaaattaaaaccctgagcagaaagctcgcgattacgacggatagtatcctgaaaataggtattacccccatcaatcaaaatatcacctttatccagatgtggagtcagtgaagcaatagttttatcggttgcttcgccagccttaaccatgagcagaatacggcgcggtttttccagtgaatcgacaaattcttcgacagtgtaacttggaactaatttcttccccggattttcggcgatcacttcgtcagttttatcacttgaacggttaaatatagataccgaataaccaccgctttcaatatttaatgccaggttacccccatcaccgcataccgaacacaccatctgctgcttggacatgaataactcctgtctgatgatattctgctcaccaatataattagcccgcaatttgtaaatgtgatcacatgttaactcacgaccagtcctaatggattagtattggtgcctcaataccgcgacaccccatttttgaaaaaacttcccagataacaatcactattgaaa

SEQ ID NO: 4529 - DNA, 675 bp, Photorhabdus luminescens
agccagtaagttattgcgtgatcccgtcagtgttgaagttgcacgtcgtaactctgcttctgaacagattgaacagcttgttcactttgtcgataaaaagcgtaaaggtgagctgctctctttcttgatcggcagccgtaactggcagcaagttctggtatttacccgaaccaaacatggcgcgaaccgtttggcagaacagttaaataaagatggtgtaacggcttcggctattcatggtaataaaagtcagggggcgagaacccgtgcactggctgattttaaagatggccggatcagagtgctggtagcgacagatattgccggcccgtggtctggacattgatcaactgccttatgtggtgaattctgaattgcctaatggcgctgaagattatgtccaccgtattggtcggactggccgaccagatgcaacagggcaggccactttctctggtctgtgttgaggagcatagcttgttaaagatattgagcgtgtgttaaaccggaaattccccgtatgcaattgctggtgttgaccacaatcctacgatcgaggctgaacctatcccacacggccctggaggcacgtggccaatatatctagaaacatatgcatgcccgttccggggccccttctgatactttccactcagtttacacctcccttaatca

SEQ ID NO: 4530 - DNA, 772 bp, Photorhabdus luminescens
aagcttgagtccaatctgaaaatccgcaggcagtgtgatatcagttttctggagagtttcctgatggttgttactgttattgctggtagtatgtgacaggaaagcttcccccgcagcgagtacaccttgttccaggttatcaccgaaatcccagagcggatgaccttgcaaagtcgcccaaagactttgccggtgatattcctgttgccagaatctatccagtgaacgatgatttagccaaattaacagtaggctagttaatattacgataaaaatgacttgcccagccgtttttaaattagatttgaattcagaaattggcataaatgaatcctggtattccttgtggtgaaatcataaataccaaagtcagaataattgctaatggtattgggtagcatatccatgaaatctgagaatacattttctcaaccattatttttagattaatcagccacggataaataataaagagtccccagaacatcagtaacaacccactattggctattatcgagtgaaataaattcgatgatatcaatcgatttaataatattagcgcatcatctagagtaggacaacggaagaaaacccatgccagacagattaagtggaaagtaatgattctggatagaaatgagatgacctgggtttggggaatgttctgatctttttcggctatttgaggaaacaactggtcttaacattgacgatgattactcccattccatgaatagctccctagataatgaaattaattgccgctcgctga

SEQ ID NO: 4531 - DNA, 682 bp, Photorhabdus luminescens
  misc_feature (371)..(371): n is a, c, g, or t
  misc_feature (446)..(446): n is a, c, g, or t
attcattgaaattttgattaattgtaaatcccgaccactgtgaaccgcctccccaaaagtaggatacccagcaagtaagggaaagttctgtatgaagaattgcagtaaacaattactcaaatttaagtgtaaagtcgcccaatattatctttctaccaccagatgagataactagatgattaataaaatcaaacagtttacactaaatcggctaataacacctgagtccgaaattctgccggattcaggaaatttaattttgagccgagttatcaaactgctgataattttttcaatatcgaataatacctcattacaccagcaagggtaaaaagcctagcagattaatcagccagaaaagtgatcaccgntggacaggtattttagcgttaacaaagcacgaaaaaagtttagaaaataaggatatgaattgattttaatcccanatcacattaaagacataaaaaagccgcatagttcaaatcaaatcgtagactaaactgattaaacagtgtaaagcccgttatccacagtttttcacagttttacctaacacatgaaaaataataaccactgtatcaaccagattcgtattctgtaaattattcacttgaacttttttatgacagattatttaactggcgttatgcaaaaattatacctttaaacaaaattattaagt

SEQ ID NO: 4532 - DNA, 766 bp, Photorhabdus luminescens
caagcttagatcgaacaaagctctgtccgccatcacacccaaccatatatgcagcttgccaaacttcatctgcatactttccatcaatatgctccgcataaagttttacttcatctttatactggacaaaatctttaacgcgccagccatatcttattgtaatatttggacgactctttgcatgttgtagtagaaacctttcaacatacatttgatttgcacgtattatgggttctggaacgggatctgtcgaagccgcattttcgcgcatagacattttctccatttccgacggtaacgtaatccgtgcaagctcccatccattaaacttggtaaaatatgatacgtccaaagggaactcttttggcacgcctaatgaccgaataggctgagatatgcctacacgacgaaaatgctccataatacgggcactatgggtactgcctttaggctgccatcgggtctcttcttccaaattaaagataacggaacgaacaccatataaattcaaaaataaagcccacattagaccaacgggtccaccaccaacgatggcaacaggtgatacagaaatattttccgaagtcaaaatatactctccttaataatgattaatagcaataaatatttcagaccaaatataccccgttattctttcaagttgcctctttggtggctgcactttctaaccccggtcacagagttatctatgctcccggggattcgctcccttgccgtcgcgatacatcttgaaatccatagggtt

SEQ ID NO: 4533 - DNA, 669 bp, Photorhabdus luminescens
gtcacgcatcagtttgtggaagaaacggaaatacatcagatgcatgatggcatgttcgataccaccgatgtattggtcaactggcagccaatagttagccgctgctggatcgagcaggcccttgtcataatctgggcaggtgtagcgagcgtagtaccaggaagattccataaaggtatcgaaggtatcggtctcacgtagtgcgggctggccgttgatagtggtttttgcccactcaggatcagctttaattgggctggtgatgccatccattttgacatcttctggcagaataacaggcagttgatctgctggaaccggaacaactgtgccattttccagtgttgccattggaataggagcaccccagtagcgttgacgggaaacaacccagtcgcgcagacgatagttgactttacgcttacctacgcccatttccaccagtttattagcgatggcattaaacccgcttcgtgatcaaaccgctaattcacccaattaaacaggatattcttatcttgtaccggggcttatggacgttcggttattaccctcattgtccgaataacggctttatttgccaggtattttttggtgcaaattccaattccttgatcgtgcccagcactgccatgactgcacccgtgcctattccatccagacgatttt

SEQ ID NO: 4534 - DNA, 771 bp, Photorhabdus luminescens
  misc_feature (506)..(506): n is a, c, g, or t
aagcttccgataaccagtatttttcctgctccatatctccacagctgattgctacggtatagtggttcatgtagatctcctgtgcgcggagagcgggtagccatcccatgtgaatgagcatatcaatagcagattggctatattttttggcggcgtcaaagtcatttcggctgagggaaatttgtcccataagcgataaagaaaggatttcgctacgatatattcccgcttggtgtgcttcagagatattttcctgcaagatttcttcggccaaggagatattttgtttggacggactactttctcgttgtaaaagaaattctgcatagtaatttctgacaagcgttatcaacggtaagctgcgagctaatctgctctctttccaccctgttatgaggtgttcacgtgccttgtcatattttccccattccatatagaccttgccaaggagtgcacgattatttgcattccatgcgtgtggcgttttctcagggatgaaatattcnaggcagctgagtagaagcgactcagcggtttcataatctcctagactgatatggacttgtgccaggtagttgcgaagaatggaatgtccaatctgatgcccaagtgcaggcttgactcgtaaactttggacagagtttcattgctgcttcctaactttcacaatcgaattcccaaactcatgtatccaagaatcaaatggatttgcctttggttcttcatgaccgttcatgactcactggactctgatgcacgatatccggggcc

SEQ ID NO: 4535 - DNA, 771 bp, Photorhabdus luminescens
  misc_feature (771)..(771): n is a, c, g, or t
aagcttttcaacgcattggggtttcgttgggaccggtctgcggctcctcttattgttcctattcattctattgagcgggtatgcttccgctttcatcggatgctgccagaatttgtttgggatgctggtgtacttgaaggcaatccctttactttccccgaagtgaaaacattgttggacggtgtcaccgtcggcggtaggaaggtttctgatcagcaacagatcttaaatcttgcagagagtgccaggcgcttactagttttagtgaaaaccggtcaatttgaattgaccaaagccacattcgcagaacttcatagcatcgttgcttgtaatgaagctttggagtggggaatgttccgtggggaagggcaggagacaaattacactccagatgtcagtttgggcaatcaggggcgtcatacgccgttgcctactgagtctggcgcaccagaattgaatcgtgtttttcacgagggtcttgctgcattgcgtgaatgtcggccttttgaacagggagctgcattctttcttttcggggcgctacagcaatttttctttgatggaaacaacgcacttcacgtttcatgatgaacggtatcttgatgtcgaacggcatcgatgcaatcagtgtgcctgcggcaaaactgtatgagttcaacgaaaaaatggtccgcttctacctgagcaaacatgttactgagatgaagatgtttcttatgggatggcatccggataaagtggcaaatctcgggttttttacatgatcataan

SEQ ID NO: 4536 - DNA, 765 bp, Photorhabdus luminescens
caagctttaaaccgcatcacatcagagaaaatgggtatgacaccgtaagcgcccgccggaactctggccgccatatcttccagtaagctataagtatcaacgccaagacgctccgccaacagcttttcttccgcgcaaaatgcatccctaaaccaacgcatggttaagccagtaaagaaactaatcgactccgcctgaaccatgccgggaataacatgaggatttatccgtgtattcatatttgggtcagtgaccggttcaggcagattaacaacctgctgccaaaatgtgccaccaataacggcggtctgggcaggtttgaccacacctaaaccaagacagccgagctgtacatcaccaccgcccataatgaccggtgtgccaatattcagtccacattgaacagcggctttctccgtgacgtaacctaacaaggttcccgtctcttttaccggcgaaagaatatcagaacgcaatcctgccatttccagtagatcgggacgccaatcacggcttaccagatccaagatgcctgtcgtaccggcattggagggatcgactgccaactcaccactgagcatatttgccagccagtcgctgatcatggttaaaggccgtcgcctgatgatagatatccgggcgatgaagagctaaccataacagacgaagcattgcacccaacgctaatgtttgccctgaacaccgatacaatcatattcaaaagtgctggcatacaacgcctgcattcaactacttcttggctgg

SEQ ID NO: 4537 - DNA, 770 bp, Photorhabdus luminescens
  misc_feature (735)..(735): n is a, c, g, or t
aagcttgggtttccccaacacctacgttcataaacccgtgggcgaatatgaccacggtttaaaatttgcatgaaaccaatattcgcccgttcaggaaatctttcgtggctttccaaagctggccccaaaatgtctacttcggccgtttccacatctggcacttgaatcacacaatgaggattccccatagagacaacaccacaaagaacagttctctctgctacccgtaaaatataggttttttccgcccttaacgcacgaaatggcacatgatgcggctcaaattcaggctcccccatattaacgcaaacctgatcatcattggtgatactcaacaccatccgtcccgattgcgtgctgactttaatatcacgcttattaattaatcccttaaggcggacaaaacgggcaaaacaacgcgctccattgccacattgtgcaacttcactgccgtcagcattaaaaatacgatagtgaaaatccatatccggatcataaggtgcttcaaccattaataattgatcaaagcccacaccggtatgcctatctggccaacgacagatcagctctggtgagaaataacattttgggtcacagcatcaacgaccataaagcctttaccagaccatgccttttggaaactggatatatgcctcaccctaaaccggaacgacctactatcgggctatctcgccatttcttaaaggactttccactggctgccttgctgctcanatttccgggattctacaatgcattgttgcctctcg

SEQ ID NO: 4538 - DNA, 768 bp, Photorhabdus luminescens
  misc_feature (484)..(484): n is a, c, g, or t
aagcttgccccctctctgacactaggctgcggctcttggggaggaaattccatctctgaaaatgtagggcccaaacatctcatcaataccaaaaccgtggcgaaaagagcagaaaatatgctgtggcataaacttccgaaatccatttacttccgtcgcggctccctgcctgtggcattagaagaagttgcaaccgacggtgcaaaacgcgcttttatcgtaacagaccgtttcttatttaatcatggttatgctgatcaagtcactgatgtgctgaaatcccacgggatagaaacagaagttttctttgaagttgaagcagaccctaccctaagcactgttcgtaagggtgcggaacaaatgcactcattcaaaccggacatcattattgctctggggggagggtccccaatggatgcggccaaaattatgtgggtgatgtatgaacaccctgaaacgcatttcgaagagctagctctacggnttatggatattcgtaaacgcatctatagattccccacaatgggggtaaagcgaaaatgggcccccttaccacaacttccggaacaggcacttgaaatgacaccatttgccgatggcactgatgatgcaaccgggcacaatttgccctgactgattatgaattgcccctaatatacctattgtcgatgaccatctaccaatggatgcgcccattcactcgtgctgatcgtggcttgcagcaatcattacacttgacaagctcagcctccatatcagcaactattc

SEQ ID NO: 4539 - DNA, 758 bp, Photorhabdus luminescens
aagcttatgggctgttcctattggagaaggcgatctggtgctgagttacaccacttcaccgggttaccacctgttatctgagaagaatgacgattacactgcggctacattcagtgaaggtcattaccttcaaatcgaagtggccgcacaactggcctccagcaagcaaccggaacttgcccagaaatttatgcagtttatgctgacgccaactttccaacaggaaattccaaccactaactggatgtatccggtcattgatatcccactcccggaagtatatttgcagctttccatacccgaaaaatcgctacaatatcgcgcggaagaagtcgcaaaataccgtaaccaatggattcgtacatggcaaagcgctgtcagccgctgatagccggatggctgttaccgggggcgattgccgccggttttttactgttggtcgccttactggcattcggaacgctctggtttaattcacctgcaagtgattgggatttattgatagaagatcgctatccgcggcacgtgggtcctttgacattctccccagcctttttatacgactatttcctgtgtttccgcctatattgtttacagagcactctatcgccgtgtttttctagccggaccctctttttgcgccgggtgctctgaccctgtttttgcccggctacccgtctatgcgccctttgtcccctatggtcgaccggttggctgctcgggtttcaaggtttgcgtcgttactcttaaaccgttac

SEQ ID NO: 4540 - DNA, 766 bp, Photorhabdus luminescens
aagctttcttccagtaaacattattcatagatgaacgagtaacacctttatgggttgatgcatgaataaactggttattggcgtcataaatgccaacatgtaacccatgttcgccactagctgttctgaaaaagaccaaatcacccggcattaaatcgcttttatcaatacgggtccctaattttatttgcccaccggtagtacgaggtaattgaatatcaaaccgatcactgaaagtacggtaaacaaaaccagaacaatctaccccccggcgatccattccaccataatgatatggtgtaccacgccattgattaagctgctccttaagctgagcaatcaccatgattggatcagaaagcgccgtctttaacacaggagccggagtcctgggggcatgactggaacagccaataagtaacagactgaacaataagagtaactcttttattcttattatcattaacccctcctcataaaatcagcaaagcaaggtgactctatccagaactcaataaaaaacaagtctgtactttagtaaaacagctaaatagttatttccctccttattctggacggctaatcaacagacaccatacaaataataatcacgcccgcagttttccataatgcgatggtttcattaaccaacgccataagccatccttaatagacaagacctacttagcctataatggataagcttatttaacggtaatatcttacgtaataaccacccacctcctaataaattcagcccgaccga

SEQ ID NO: 4541 - DNA, 778 bp, Photorhabdus luminescens
caagcttgggtttccccaacaccacgttcataaacccgtaagcgaatatgaccacggcttaaaatttgcatgaaaccaatattcgcccgttcaggaaatctttcgtggctttccaaagctggccccaaaatgtctacttcggccgtttgcacatctggcacttgaatcacacaatgaggattccccatagagacaacaccacaaagaacagttctctctgctacccgtaaaatatacgttttttccgcccttaacgcacgaaatggcacatgatgcggctcaaattcatgctcccccatattaacgcaaacctgatcatcattggtgatactcaacaccatccgtcccgattgcgtgctgactttaatatcacccttattaattaatcccttaaggcggacaaaacgggcaaaacaacgcgctccattgccacattgtgcaacttcactgccgtcagcattaaaaatacgatagtgaaaatccatatccggatcataaggtgctccaacaattaataattgatcaaaagcccacaccgggatgcctatctgccaaacgacagatcagctcctggcgagaaataaacattttgggtcaccagatcaccgaccataaactcattccccgaccatgcattttggagaactgcatatcatgcctcaccctaacccgtaacgactaaccactcggcttatcctgcttatttctcacatgaccttccccttgctgcgcttgctgttcagtatcccgggaactgagatgcatcggtgccttctcg

SEQ ID NO: 4542 - DNA, 685 bp, Photorhabdus luminescens
  misc_feature (580)..(580): n is a, c, g, or t
  misc_feature (638)..(638): n is a, c, g, or t
  misc_feature (666)..(666): n is a, c, g, or t
tctaatgcacaagtgattgatgtcacaaaaatgcccaagggtggacgtgttatttttgggactacagttacggttttgaatgttaatactgatgaagagcagacttaccggattgtgggtgatgatgaggctgatattaaagaaaatttaatctcagtgaattcaccaattgcccgcggtttgataggtaaagaagttgatgacgttgttattatcaaaacaccaggcggtgaagttgaatatgagatcctgaaagttgaatatatttaacttcgggattgtcctgttgctattgatttacgttaggtaaagttgcataaggatcgtggaaaagtaaaaaaggccgaatatggccttttttatcataatatgcgcaccgcattttatataaatgtggtttgattatttaggtaaaataattttgcgttcttccgattggcggtaaagaactagagttttaccgataacttgcacattatatgcaccggtctcgcggacaattgcatccgcgatcaaattttgggttcacgatcttcgcctgcgattttgactttgataagctcatggtgtgacagcgttntgttcattttcggccaacacacccttcgtcaggccgttattaccaatcatgacaacanggtttagcgggtgagcgagacttttcangtgtcgtacttgtttttgt

SEQ ID NO: 4543 - DNA, 679 bp, Photorhabdus luminescens
  misc_feature (231)..(231): n is a, c, g, or t
  misc_feature (295)..(295): n is a, c, g, or t
  misc_feature (358)..(358): n is a, c, g, or t
  misc_feature (679)..(679): n is a, c, g, or t
caaaagagccgatagagagtggacaaagtggcgcttcacttgcaccagccagcataatatccgctctgccataacggatatgctccatcgcaatgcctaatgcatcaagccctgccgcacatccggttgatatgttactgacggacatagatgcaccatattttttcgcaacagaggttgcggcagagctgaaatcaaagctgtcgtaatcttctgatttaattaaatcanggtgaatattctctttgccccctttggtgattctgagtaaacactcttccattcccgcagcatnggcaatcgctgtcgctatcgcaacaccaaaacgtcgaccatcaatgtctgagggtcttaaatntgcatcttgcatcgccatctcagcggcatctagcgcagactggagatatttacgctcacttttcaagacaaactctttgttattgccatcactacccgaaacttgtcctattgctccgcttttaaagcccaatctttctctgtcccactcatatttactcacatcacgattcccgttatgaatattgttccaaaattcattaacgccaacacctgtcggtgcaacaacacctagccctggaccacaactctacgtggctgagattcatttctgttatttattatcacaatgatatctcgatggaatagactaaccttactn

SEQ ID NO: 4544 - DNA, 676 bp, Photorhabdus luminescens
  misc_feature (656)..(656): n is a, c, g, or t
tggtctatacagggtatcaaacgcctgcaacaaatttgtaaaaactacaacgtgagctgtagcagctcgcctaaaaaaattaactggaacaagctactaagtcgtgttgacatcatcccaacccattttgttgccactcaggccgcaacagaatctggttggggaacatctaagcttgcacaacagaataacaacttatttggtatgcgttgcggtaacaactgtaagaaaacccaaggtaaaataaaaggttattccgcctatccgactatcaatgattcggtcaaagcctatatgagaaatatgaacacccataacgcttatgaatcattgcgtgcttcacgcgccaagcagagaagccttcaggaatcactcaataccagccaattgattggataatctggaggatattcacaattgggttcgaattacacaacctactgcacaaagtatttaaacagcattaagggcttattaactaagggcagaagttaggcttaaaacgatcacaataagaagcctgagtaagtcattagcatgaatatctttggggttgaatatttgtgctaaagaacaaaatcatgcgttacacataaccattatggaaacggtgattttctatgggcaccgggttattcttttaattgaagaatggntaaggtaaaaacaataaata

SEQ ID NO: 4545 - DNA, 846 bp, Photorhabdus luminescens
  misc_feature (8)..(8): n is a, c, g, or t
  misc_feature (20)..(21): n is a, c, g, or t
  misc_feature (52)..(52): n is a, c, g, or t
  misc_feature (137)..(137): n is a, c, g, or t
  misc_feature (140)..(140): n is a, c, g, or t
  misc_feature (186)..(186): n is a, c, g, or t
aaaaacgngttctttttganngagcggatcacaagtttcacacattgaaacnagctatgaccgatgacttacgccaagactattttagggtgacatctactagaataccttcaagcttgagaatttactcgcctctngcngtgatttaacttgactgagccagacgttcacttcaactggacggcngctttaatacaagcattcatctatatcgagcgtctcgcgctcagcttcatgccaatctgtcaagctggatggaaaatcattcgagatcctatgcacggaacagaattgtgcgatcgtcgagaagcattctcctctgaccggcggggataagatatcatcgctgacccagtggcggcacgcttgatgtgagtaaaatcacagcagaggacccctatgaatatgaagatgaacacggaacgggttatgaaaagcattatgaatatgaaaatgctgatgacgaggaagactaacaatcttacccacaattctaattacccatagcgagccgtctcatcactggcgcgaataattcaacccttaatgctggcggtgacattattgatacctgggcaactttgtcggcaaaggggtgactgcctttgtaaaacatctcagagttactttctccgcagggaggttaactcatttgaagggactgtaccccacctactttgccgtgattgcatatgtataaaccaggctcctcattgaccttaaacccttcacaatccaatgcgagagctcctgggataaatccggtggattaaccgacctgttatcactcggacaacattctcctcctatttcttttgcggagcctatcccccgcgtgttctacat

SEQ ID NO: 4546 - DNA, 686 bp, Photorhabdus luminescens
  misc_feature (330)..(330): n is a, c, g, or t
tcttactggctggcaaatcaccattactcaagaaaattgggggagaagccagatttcgtctggcctattgagctactttcaatatggataattatcgtctcaatataaggaaataaaaattgatgaataatactctggagttcctcttttatgcccagttcacgcttacaacaacaattcattcgattatggcaacaccatcaaggaaaagaggctgaaaccacgttacaagaactggcaaatgtactgcattgttcaaaacgccatatccgttcactgctcaacaatatgcagaaagcgggctggttacagtggcaggctgagtctggncgagggaaacgtcctcaactgaatctcttacgtgatggatgggaacttcaacaacaacgagcggaacagttgcttgagcaacataacgtcgagaagttggcccaactggttggtgataaaaatacagtccgccatatgggactattccagattgaacgccgcttccgcagggaaaaaacctactgcggatactctattattcgcccttacctaaccttctacccggtatacccttacgcccttctgaaactcatctggtcggcagatatttatatcctaatccgattaatggagaaaatgggggacccgaagctgccttaactcataattggcaccattatccctcaaccttggcg

SEQ ID NO: 4547 - DNA, 762 bp, Photorhabdus luminescens
  misc_feature (712)..(712): n is a, c, g, or t
  misc_feature (762)..(762): n is a, c, g, or t
aagcttgcataaccaccaattcactacgggttgccagcgtaccaagccccagtaaggcaccaagcaaagctgccatcgggaagaatatctgaatatctttcggcacacttaacaaaacataaagaccagcagaaatagtagtatattccccctgccccacttttcttaactgctcgacaaacttaataataccggagagtgataccagcataaacagcgtcatcagaatagtctgtagaatagtccgcccgatataacgatccaatacaccaaacatcaggctactcctctgccgttgaaacgagcccggatcctacgcaccggcaacgtatcccaaatattgagaaccagcgccaacatcagataagtcccattagtcagccacatccaaatcatcgggtccaatttgcctttactaccgttagaacgcagggagctttgcaataagaagaaaatcagataaagcaacattgcgggcaacatgcttaatacccgcccttgacgtgggttcaccacacttaacggtacaaccatcatagccataatcagtaccgagagcaccaaagtcaaacgccaatggaactcagcacgggagtccttatcattatcctgccataactggataatagatttctgttcaactttattattatctacgattgaagtctgatgcccataatcgcttgaaatcacggaactcagtgatcctaanatcacgcagcattgcagtgccttcataacgcgtaccatgattaaggacgn

SEQ ID NO: 4548 - DNA, 765 bp, Photorhabdus luminescens
  misc_feature (6)..(7): n is a, c, g, or t
  misc_feature (16)..(16): n is a, c, g, or t
aagctnncacggcggnaataataacataaaataaagacattaaactggttttataattagctcacagttggaaagaacaacatgataaatgaacagtttactcgttgggattcagcagaatacctgaaaaccaaagtagatatggctgcgtatttgaatgcctgtattgaagaagcgggtgatgatcctgcctttattgtgcgtgcgttaggtacaattgcgcgtgcgcatggtatgactcaggtggcaaaagatgccggtctgtctcgtgagagtttatatcgggcgttatctggtgacggagaccctgagtttggcactattctgaaagtcgttaaagcattaggtttgaaactccatgtgacagaggaataatattgatcatagtaatgaataacctgctatttgccccgcttgctgtggaaaggggaaaactaaaaggagtgaactatcctggttacagaacaggttcactcactactttacggatgttgcagttaacgctttatgcaaagccacagacttatacagagagggactgtcattcgtattagcgcctagcgatactcccacttatatttaagctcaatgaattggctatcacaacctaaggctgcattgaggttttggcatttttccagccatctgtgtaaattctaatggcacttgtcttacatgctcatgttaacgattggataaaatccgtttctgtgttttcgggattcgttacctatggcttgaccgtcatatatgcctgaaggtgca

SEQ ID NO: 4549 - DNA, 675 bp, Photorhabdus luminescens
  misc_feature (563)..(563): n is a, c, g, or t
tcaacaggtgaaaccaccaatcccggcaaccgccattccgtgttctcattgttctgccaggcaaacatcacttggaacaatggggtatgcgccagtcggcgggacggttgcacgatttccaccacctgctcaaacggcagatcttggtgttcttgcgctgccagcgccgtttgtcgcacacgtgccagtaattccgccacactgggttcaccggataaatccatacgcaacgctagtgtattcacaaagaagccgattaaagattccacttcctgtcgactgcgaccagcacttggcgtaccgataaccagatcttcctgacccgatagacgcgacagaaccgtcgcccaagccgccaacagggtcataaataacgtgacgccctgttgctcactcaggagtttaagagattgggttaactccgcatccagactgatgagtaaagcattttcggccaatgactgctgaagcggacgtggcctgtcagtcggtaatccatcaaaactggacgtcagccacgtttgtgcaccattaatcagattgagactgtatctgtgctgccnacagcaattgacactgccaagcggcgtaatcaggttactgaatcgtcaaccgtagcaacggatctggctgttgctttaagaagccaatacagcttttcagctctaactgaca

SEQ ID NO: 4550 - DNA, 741 bp, Photorhabdus luminescens
aagcttattaataataaaggaaacctatcgaaaacccttaaggatatgggaagcagcgataccgttaaatcaactatcacatcaatggcgatgggtggcgcactggcgggttttgataacgtcatgggatgggataaagccgccaatggcgctcaaattgacccggcaaaagcgacattacctaaactgagcaatggcgactggagcaaagtggctcaacggatcgccggtcaatccattatcagttccagccttggtacagccatcaatggcggtagttttaaggacaattttaccaccgcattacttgccaatattggcagccagattaacgccgaaggtgccgggttgattggggctaacggtcaggtgttagatttacccggaaaagccattagccatgcggcggtttctgcccttgctgcggaaattggcggcggtgatgccaaaggggcggcggctggagcattagccccagaattggccgcgataacattggataaaacattcaatgatccaatgaacattcacgcggatggcaaaatcatcggccgcgttccatgggccattgctaccacagcgtcaaagggctaacatcggggctaatgccgggaaattgattcacctttaaccacccaacctcctaaatgcccacaatttgtctacacatctccccatctcatcaattatgaaccctttcctaattattttgcaataatacaccaacttggcgctgataac

SEQ ID NO: 4551 - DNA, 660 bp, Photorhabdus luminescens
  misc_feature (232)..(232): n is a, c, g, or t
aagttatagagatcaccgataccgccctgagaagcaggagtattcacgagaatacgagctgttttcattttatcgccaaaatacttgattcgtgcggcttgattgtcctgatcggtatacaagcaagaagtgtgaccaattccgcccatttcaaccaatttttctgccttttctacggcatcttcaaagctattaccacgatacatagcgagcagtggagacaatttttcgngagcaaagggttctgcttcatcagttaagctcacttctccaatcaagatcttggtcttttcaggaacattaatgcctgccatttcggcaatttttgttgcagattgaccaacgatttccgcatttagactaccggtcctcacaatgatattttgaacagctttcagttccttgccttggaacagataaccggcatgagtaaagaaacggtgacgcacctgatcctaaatttgatccaccacgatcacggattgttctgaagctcacatgactcccgcgtcaaaggttgtagaaattcgaatagatgcgtccccccgttgaaattcggctgattctcaatgacttctcgggggttcccgtatccaccccgcttgcgggttaccaaacatgatgcctatttactataattgggcttcggtccaacatata

SEQ ID NO: 4552 - DNA, 765 bp, Photorhabdus luminescens
  misc_feature (529)..(529): n is a, c, g, or t
aagcttatcagggggacgaggtatataactttttcgataatctactgccggataatccggaaatcagaagaagaattgttgccaggcacaatgctgaatcaacgcaaccttttgatctgctggctaaagttggccaagatagtgtaggtgctttgcaattggtaccgcaaggtacatccgctaatgatatcaagaggattgaatacaagcccttatccaaggtggaactagagaaagtgctaactggctaccaagctggtgcgccattggggatgatcgaagaagaggaagattttcgtatatccattgctggcgcacaggaaaagacagcgcttttaaatattgatggaaattggtgtttgccattaaatgccacgccgacaacacacatcattaaacttcccattggtaaaattgagagtcattcacattccattgatatgcctgaaagtgtggaaaatgaatatctgtgcatgttgattgccaggatgtttgggctgtctgttcctcactgcttaataatgaaagngggagagataaaagcattagcggtagaacgatttgatcgcaagtactcatctgacaacagttggataatgccgctgcctcaagaagatttgtgtcaaaccttgagcgtgccttcggacaaatatatgacattcatgtcgccctcggattacctaaatcatgtgctgctctggggttccgttaaagcccatactgaccgtttgaatgctgaacattcccggttatgttggctgtgga

SEQ ID NO: 4553 - DNA, 674 bp, Photorhabdus luminescens
  misc_feature (202)..(202): n is a, c, g, or t
  misc_feature (358)..(358): n is a, c, g, or t
tcaggtggcctgttctgagtggaacgatatccgtgacgagatcggtcataacgttggtgtttatgataacccggcggacttaaccgctaaatcatggaccgtgatgcgcttctcagaagttgaagagaacggcaaactggaatggctgattcgtaaagatggttgtatgcactgcgctgatccgggctgcttgaaagcttgnccagccgaaggggcgattatccagtatgcaaatgggattgttgattttcagtctgaacactgtatcggctgtggctactgtatcgcgggttgtccgttcaatgtgccacggatcaacaaagaagataaccgggtatataagtgcactctgtgtgtngaccgagttaacgtcggtcatgaacctgcctgtgcgaaaaccttgccgaccggtgcaatccattcgtggagatgaaaaagcatgaatgactcggtggctgaactggtgattgagtagataggccaaagttatgagaagccccgtcgtacaactcttatggggtcgtagggattcatttatgtatggtggaattatgctaagaaacctatagatatgatgaactacggtgcagaaacagaacaaaaacacacgtaggtaaaggaagggtgccgaaacccggatgaaaatggatttacatgattacgccagacgaata

SEQ ID NO: 4554 - DNA, 769 bp, Photorhabdus luminescens
agcttttattacccgcaatcttggggtgggtctggtcaccagtttgatcgcactggtgttgggcggattgttatctttctggggcgatcgattcgggttatctactcaggctattaaaataattgtctggattatcagcatggcgggggtgatatggctgttgaatctttttcgtgattacaaacagcgtctgcctgtacaggaagtagcggttaaaccgcctgtagagcaagctgtactttcagaagcgccattttattttcaacggttgcaatatcagcttcgtcggcgttatggccccctttggcgtctgcgggtatgtattctgttggtgatgggacaacgggaacaagtacaagccattgcccccgggttaaccgcccagcactggcaagaaggcgagcaccacctgttgctgtggggcggcggtttgcaggtacagccggataaagcgcagttacaggcgttgcgcctattgcgtcgccgtcgtccgctggatggcgtggtgtgggtgacgactcgagagcaacttcggcagcgaacgcagatagagaccgcgtttgcccatgctggagaaacagggacaacagcttcggctggcaagcccccgtgtatgtgtggaaagtgcgccacagcaactgggaccagcgcgacctgccatcccagaccgtgggcctgtttctgttacaagagtgtacacctgataacctgtctcagagcctgcacaacctgatacccatgctcgcgacccgcggcttggaacaggcat

SEQ ID NO: 4555 - DNA, 754 bp, Photorhabdus luminescens
tcattttggtgttccagtagccatttccgttcctgcataatttgttgattgtgttgatcaatcacggggacaacaacatttaaaaacgctttcttacgtagggtgcccgaagggtattttcgcaaatctggcaaattgctttgcatgtcattgtgagaatactctatgcttttagctgtgctagttgaagcatgactaaaagcggaaaacaatagtgagataaagaaagcgaagatggcagttgtcctcatcgttgtttgagagggcattgcttttcctcgtttgctctgaataaaaaacaggctgatattagcaaaataaatccagcatagccagagttattagtgattcataaatatattttctgtaataaaaattattattttgctaatttgttctgtggttttttattaatttctatatggttatgtgctgtttgtgtacaaaatattgcctgtctagattgaattattcatcagatatgatcatgatttttgagttaattttgtgcctgtaagtcgctttatcaaaagaaaagtgatttgtaaaccagctagtgtatatcggaagtgattgaacttagttttatatagtactggtaatcatagtactgccaatcgtaggacaccgcagcgagcataaactaattgatattaatattgccgtataagataagtataattttcataaaaggaaacctctaccgtatcgtctcttactctgagtaaaataagtccatcttccggttgagctc

SEQ ID NO: 4556 - DNA, 751 bp, Photorhabdus luminescens
aagcttgctctaaaataaaaccggtaaagtcagcggtttctccgtctggtcgaggaccaacttggtctttcaataaataaacgcgtaaaagtccctcttgatctgtacttaattctaccgaaccggttgtaaaatcggtgctgtttacagcaaaagtgttggggccttcggtgcgactctgtaaaccaaaataagctgatgaggcccattctgatgatacgcgagctgtacctgttagtttatatttagtgttaggttctaatccttcgataatttgatcaatgacgccagaaccggtaacgctttggattctgataaagtgaacgccattttcagataagatttctactgactcaggagctgggattctccagccgttatatccctcttcgaatgagccgttaaccagttctttatgagagtttttcttgctatcagaataatcttcattattcaggatttcttgtacgttcatatattagtcctttttaaatagatagaaatgaatttaatttctttcagcactctgtttttcgggggggcactttatcataatgggataatactcaattgtattttttgttggtggtgaattgtaatttggctaaattaatacaagaataaatgagtcataagcgcttattccgataggtgtttctgtacgctaatatcgtgctcgtgacaagctcattgccgcagaatcgtatgtcgaaatatacgcacatttgaaaaaagattcagtgaataatgg

SEQ ID NO: 4557 - DNA, 771 bp, Photorhabdus luminescens
aagcttaatgtggggtattttccgttttccaagcgaacccagaatagaaccaaaagactcattgaaattttttgaaaactcaattccaagctccaaaaattatgataataaagaagttaggttctctaagggtgaaaaaggtaatattcatcggttcgaagaaactaatgggaagtatcactggaatagaagtaccagtgatgtaaagaatccgttgaataaaaatgacattcctaatgttttattttcttttcaggaaaataagacattgtttgaaaaggaactaattaattagtgtgggagccaacaccggtattcaatattttgctaatagcagtgttgatctcaatgatatcgtttttgtgcactgggctggcgtattaacggccaattctggtcagtaggcacaatactttggaatgtgacctgtagggctggctcaagctatgtaaaatgtgatggttcaaagaatggttgagtaaaatttttctttattaaaaacattatatggatattgcgcatatttttatgaatataactactttctttattatcagatggtcgtgtcggatctttatagatgaaatgtttcttcttttacttggagatgtaaataaggctattaaaaatagggggatttattgggatcataaattattgggaagatcccaccataaatccatttttcatacggatggatcgcttgactcccatatatgacattgggagtaaaataatcatgtttctacgcctctcgtcctataataaaat

SEQ ID NO: 4558 - DNA, 773 bp, Photorhabdus luminescens
  misc_feature (592)..(592): n is a, c, g, or t
aagcttgttgtgcttcactcaattgattgggattagcacgaatgcttcccaaatctaccaatttatcatgccctttatgactagccatatttgccaacgattgccgcaaataatcaggaccttgattggcaccgggccttccctgattgcgcttcacaccttcatcacattcaaaccctaatagagcaacatagtgagaaaattcttccggcgtaaaatacggagatagtttaactgtttgaaaaagccgtagtgcattatccgcttctgccaaatcatttcgtccttgccaaatagtcggcgaagtagcatgccataaattcatttaccgctccttatctgttatatatgctggaatgagtcataacaccacgaaacactctggtattcaaagggttatgacccaactcatagaaaatatcaacgggattctctgcatcccagaccacaaaatcggcgtaagctcctgcgcgcaactgtccgtgacccggttctctgccaatgcacgagccgcatgtcgggttacacctaaccatacctcttcaggagtcaatgcaaattgaacacatgccatattcatgggcattcgcanagaagcaaaatgggctggctgcaggattaaaatcggaagatacggctatcggcacattaaatggccgcaataatccatacgagggcaccgtgttttctggcaaagtatgatgccccaggaagcaaaacacctacctaaccactgtgactgaccgactaactcccccctgatctaatattca

SEQ ID NO: 4559 - DNA, 774 bp, Photorhabdus luminescens
aagcttatttattgtcatatttaatatatctatcggtgatattattcttcgcttgcttcacatttaattaatctaccatgattatttaaaagtgataataaagagaaactaaattttttatataaaaggtagatttaattaaataagtaaaattttttaatagaacagttaattacatttaatcgaaacccttcaatcattaacagaaagttaaaaagaaataagcaagtaaaagaatattactcatacagtttaatattcaaaatctttatttccatcattttacgcagcagaccattaaaataatgtcataaaaaaatgggttaaaccggttaacttggcagaatttaaaccctgaaaaaagcgtgattattcgaaagagtctctttacatcatcatgctatttaccggctgatttataaagataaaaagcgagtgtgattaatgttttttataccttatagatttcaagatgcatcgcgacggcaaaggagcgaatccccgggagcatagaaaactatgtgaccggcgtgagtgagtgcagcccacaaagaggcaacttgaaggatgacgggtatatacccgtaatcattgaagatgcttgattttatccgtaatggagatcattatgcttgctttgaaaatattcattaccgatgaacaaaaagccgaacttgaacatgtccatcacacctgccgtgataagagggagtgtgatcgatcaaagccgacctgctgtcctcttgaggctcgagttcattgatgaatcgttag

SEQ ID NO: 4560 - DNA, 762 bp, Photorhabdus luminescens
agcttatttagtttatccagtcggaccggcgggtctactcagctcctccctaattcccacttcaggtgcaaaaattagtcacgacaatacatccgaaaaagtctagccaaatgttctcctgcgggagttaactttgtatctcttcgttgaacaaggcaaaaagttgcaaagggaagctcctctttaaggtttaacgccacaaattgctggttaaacagagtctcatcaaccacatccacagctacaatagtcacaaagtcactttcggagactaaactcatgcaagccattaatgtttcacacgtgacactaaagacaggtggattatccagcgatgtaaacatctcaaataacctgcgatagtaggtgcctttcggtgttggcatggtccagtcacaatcaattaattcgtctaaagaggttgcattcacttttggatgcccttttcgtacaatcactttgtactctttttccatcaatttttcgaagctcaattctgcatctaagctaccgggataataggtgttcacggcaaaattcacttcaccttgtctgagctgaggtagcatagtcaataactgtccctaacaactcttaattttactgcaggataatcacggtgaaactgtgtaatacctttggcatcatcgtacctccatactgccagctaccccatattgactacacaccgttcagcccacttggtgctaatattttcctgtgcattccaagccctcaagctcaacaggtccttgaaaaact

SEQ ID NO: 4561 - DNA, 697 bp, Photorhabdus luminescens
  misc_feature (595)..(595): n is a, c, g, or t
  misc_feature (612)..(612): n is a, c, g, or t
  misc_feature (697)..(697): n is a, c, g, or t
accgttgggaaaccaatgatacctctgcacgctttattaaaccgggagcctggcaaggaacctatgccggtctgcttgccggagaaaccttaatgttgaatctggcccaaatggaagatgcgcacctgaaacaagaacaacgtgcgctggaagtggaacgcacggtttctctggcgcaggtgtaccaatccttagagggaaaaagctttacattgaaagataaaattgaagcgttgctacaagaagataaagagacttccgtcggtaataacggtaatcaattgaaattaaccaacaatacgctatccgcgacgctaaccctgcaagacctgaaactcaaagatgattacccggaagagatgcagttaggcaaaacacgccgcattaaacaaattagtgtctccttaccgtcactattgggaccctatcaagatgttcaagcggttctgtcttatggtggtgacgccaccggcttagctaaaggttgtaaagccttggcggtctcccacggcctgaatgacaatggtcaattccaactcgatttcaacgatggcaaattcctgccgtttgaaggaatcgatattaatgacaaggngacattaacgctaagtntccccaatgccaccagtaaacaaaaaaccatattacagatgctgaccgacattattctgcacattcgttacactatcctcgaatn

SEQ ID NO: 4562 - DNA, 662 bp, Photorhabdus luminescens
ctgctgtaaaacgtcacgctaagaagctggctcgtgaaaacgcacgccgcactcgtctgtactaatccttgcggttgatccgcatagtgattgaatttgcagacaatagtagttgcagataaaggccgtgctttccgaaagggagcgcggcttattgtcgttcatcaacaggcgtaaaagggcttatggctggacgaattccgcgcgcatttatcaatgatttattagctcgtaccgatatcatcgatctgatcgatgttcgtgtgccacttaaaaaacagggtaaaaatcaccacgcgtgctgtccatttcataacgaaaaaacaccttcgtttactgttaatggcgataaacagttttatcattgctttggttgcggagctcacggcaacgctatcgattttctgatgaattacgatagacttgagtttgtcgaatccatcgaagaattagcggctatgcatggtctggaagtcccttatgaagcaggttcccgtcacaggcagatagaaccgtcaccaagacaaaaccttaccaactggatgataagctaaccactactatcaaaatgtttaacccttctgctgcccacaagcccggcattattgcttatggggggcttattaacaaatatccacccttctcattggcttccacctgcg

SEQ ID NO: 4563 - DNA, 664 bp, Photorhabdus luminescens
tgaccatgctcaatcccggcggctctaagaccttgaatacgacgactctgagagagaacgcggcaggcaagcaggttaagctggatatcaagatcaaacgtctggaacagcaactgactatgcaggtggctgcctccacgttgttcggcccaaaatacgtgatgctgttttccgaattacaggcctacaaggaggtcaatgctcgctacaacgccttactaaaagcatcctctacggaagaggccgcagctctcggcgggctgaccacggtgcctccggcctccgatgatctgccggtaaatatttcgttgctgatgatggaggagcgtcctggctacatccgcatgaacgtcgcactagttaatgccagcaccgatggccgcttcaaagatttcttcctagagaacggcagattagttgtgtcggcggacaggtattaacttctccttggtaccgagcccgctcctagcctggaaccacaataccggctcaagagtgagcaccatctttcgctcgccacctatgcgccattcgctcggtgctggtcaaaaccaattcggcgagaagtacttcgccactaccctagttcggaagcaccttgcgtgaaggctcaaggcgcagtggtggggaacggtcgaaaatgctgtgaccacgttgaccgagg

SEQ ID NO: 4564 - DNA, 683 bp, Photorhabdus luminescens
  misc_feature (365)..(365): n is a, c, g, or t
  misc_feature (549)..(549): n is a, c, g, or t
  misc_feature (604)..(604): n is a, c, g, or t
  misc_feature (666)..(666): n is a, c, g, or t
aaaccctgtagtgggtgcggtgattgcgattgcggtcgcggcggtcacggcgggttcgggcctggcggcctgggcgggaagtggtgccgtgggggcgacaggcgctacgggagccacggcgagcgcggtttatggggcggcttatggcggaatgatcgggttgacctcgcaggcggcggtggccttagttgaaaataaaggggatctcaccaagacactggctgccttagcgaagcgcgaagccgtcaaatccctcgtgacccaaatcgccgtgggtggcgcattagggggcttagaccacacgatgggctggggaaaattagtggagggaaaaggcgttgtcgatccgctaaaagcgcagcttnccttattgagtaatcagaattggagtcaggtgggccagcgtgttgcggcacaatccatcgtgagttcacaatagggacggcgattaacggcggcagttttacggataacctgcaaaccgcgttgttgagcaatatagggtaccagattaatgcggaaggtgccaaactgattggtgataatggngagattttaggccattcaggcaagattttgaccctacgggtgtggcaggccttancgctgaattgccggcggggatgcccaaggggccgcttgtgggtgccctggcggttgaattgncgcatcacaatggaaag

SEQ ID NO: 4565 - DNA, 698 bp, Photorhabdus luminescens
  misc_feature (100)..(100): n is a, c, g, or t
attcacaggcaatgggccggtttgaatatgactcaagaaatgttgtgacatccgattctactcatgagcgcttataaagtaacgaatcacgatgaatganggttgacgaatatggacagcgatatcttacggacatctctactaatacgagaaacggaagaagcattgttacgtctttattccactggagagctccatggaacagtgcatacatgcattgggcaagagttaacaggcgcaatagtatgcaagtttctgaaaaaaaatgactgggtattctccaatcatagatgtcacggccactttctttcgcggacaggcgatgttacaggactgatcgcggaggtgatgggaaaagcaacctgcgtgcgtggaggcctcggatgaaatcatcatctttgcaaacagggatttttctgtaacgggattcaaggcgggattttaccggttgccaccggagcagtttccgccagaagttaccgcatgaataatccatctaaatagcatttatcggagatggcactttcggaaagggcgtccatattacagattaactatccgagcaaacgcgatctaccgctactgatcctgtttacaaacattcatgacctcaatcgtattttatttcagagacttcatgagggcgcctaacatacgcccacaggctttcggctgagatttacaaacccgatcgttgg

SEQ ID NO: 4566 - DNA, 837 bp, Photorhabdus luminescens
  misc_feature (1)..(1): n is a, c, g, or t
  misc_feature (17)..(17): n is a, c, g, or t
  misc_feature (36)..(36): n is a, c, g, or t
  misc_feature (38)..(38): n is a, c, g, or t
  misc_feature (43)..(43): n is a, c, g, or t
ncccctgagttaccaantgctggcactcgtgaaganangacgngtgcttttgagagcggataacaatttcacacagtaaacagctatgaccatgattacgccaagctatttaggtgacactatagaatactcaagctttggcacagatagcccgcgctcatccagatgtgcaagtagtctatccggttcatctaaacccgaatgtcagtgagccagtaaagcgcattttgcatgatattgataacgttattctcattaagccccaggattatttgccatttgtttatctaatgaaccatgcctatatgatcctgacagattccggtggtattcaggaagaagcgccttctttaggaaagccggtattggcaatgcgtaatactactgaacggtcagaggcggttgatgctggaacagtacgtttggttgggacagaaacaaaaactatcgtggaagatgtgactcgattgttgacagaatatgctgcctatcagcgaatgagccgtgctcacaatacttaccgggatggcgatgcctgtcatcgtattctccaagcttcgaataaatcacgtgacactatgagctttgaactgtgagctccgaaatctttctgtaattgggactggtatatcggcttgccatcggtataagccgtggtctcccgtattaagaactccattggcgtgattgttatgacgatggcgataaaaccatcaaccccggtcgcatcctttttggatgatccgttctcgacaatcggttatagtgttcgcggaacggggccgcccgcaggagttcccgtcacggattccatacgctttttcgtgcgctgctaca

SEQ ID NO: 4567 - DNA, 686 bp, Photorhabdus luminescens
  misc_feature (227)..(228): n is a, c, g, or t
  misc_feature (239)..(239): n is a, c, g, or t
  misc_feature (291)..(291): n is a, c, g, or t
cctatattaaacggagatgttggaggtcggaaaaacccttcagaaattcgggatgctttaactggtgagctttatcgtcaagggtaaggggagataaatatggatcaatttgctgtctttggtaatcctgttgcgcatagtaaatctccgcgtatccatcagttatttgctagacagacaggtattgagcatcgttatgggaaaattctggtgccgataagtaaatnncaagaggcatnggatacatttcttaaacagggaggtataggagtcaatattactgtgccattnaaagagcaggcatttattcgagcaaatgagttgactgaacgggcaagactcatcggtgcacgtaatactctgaaattactcaataataatccattcgcttggtgataacacggatgcgataggggtatcaacagacccgatgcgacttgagtctattactccaggccaccgtatgttaatcatcggagctcgccgacccgccatatgtcgcgccatttccccataataattcgcctgcaaattctattaccaacgtacgttttccccctctataccagtctcttattattctttcgccgttcgcacttttcgctctatcgagatgaaatttcttattcgcccccacatgtaccttatataccatgccaatcgcatatggcacgacacgtcagaaa

SEQ ID NO: 4568 - DNA, 770 bp, Photorhabdus luminescens
  misc_feature (770)..(770): n is a, c, g, or t
aagcttgccttctatgttaaaacccttagggaggccgctgtaataaagcataatatcattcgcatagacgaatcgagattcgttgtcttttatgatccaaaagtcgttgctgttttccatgtatgaaatgaaggcgtcaaagctttttgaatgaacatccagatctttatttacagagaaactcataattttatctttcataatttcacctatcatgattaaactgtaaaactgtaaaactgtaaaactgtaaaactgtaaaactgtaaaactgtaaaactgtaaaactgtaaaactgtaaaactgtaaaactgtaaaactgtaaaactgtaaaactgtaaaactgtaaaactgtaaaactgtaaaaacttcgatgtaaggttatcacttttacgacgcaatgagtaattatgtttttaatgaagaattacaatatggaatgtgaaaaaattcgctgttcatgtaattggtttaattaagtgtgaaaatctgacgtgtgtattgattttcgctcttgtttataaccgagcagtaaaataattttatagctcgtggtcctattctcttaggttaaataatgtggatgatcgcttttagtgccatttgaaagataacgggtatagacagcattaatctaataacagaagtaaaagcatttaacagggttaacccgattagctgcgaaaaaaggaataaaaaagtttatttaattacattaaaaatgattaaaggaatgaggggtgttttaaaatcttagcatacctgttacn

SEQ ID NO: 4569 - DNA, 773 bp, Photorhabdus luminescens
aagctttgcccggcagagttatcttcggtgccggtaaaatcgctgaaacaaaagcggaggcgcaattgctggggatcactcgggctctggtgatctcaacgccacagcagcttaatctggcaactgatgtgcagtcgatattaggcgatattgctgctggtatttatgataaagccgtcatgcatgtcccagcagaaacagtagcggatgtcatgcgcgttgtggacgagttgcgcgttgacggttgcgtggcaattggtggcggctcgacagtcggattggcaaaggcgatagccctgcaaaccgcactaccgattctgacgatccctacgacttatgctggctcagaaatgacgccggtctggggtataacccgggacgggattaaaaccaccgggcgcgatgtgaatgtattgccaaagaccgtgatttatgatcctcaattgaccctcagcctgccagctcttatcttcggccccagcggcatgaatgccactgcccactgtgtggaaggattgtattcacagaatcacaattcgatcacatccctgatgggtgtagaagggatcatggcatttccccttaacctgcctgaattgcgatacgccaaaacatatccatgcacgtgctcagccatgtatggagcttgattgcccgcatctactgcctttcgatggatggcacccaccacaagctcgcgttactctcgaggaagccttatttgccccttgcccagtcctcccgcgattcttctccgcactccgttcttcaac

SEQ ID NO: 4570 - DNA, 692 bp, Photorhabdus luminescens
  misc_feature (98)..(98): n is a, c, g, or t
  misc_feature (233)..(233): n is a, c, g, or t
  misc_feature (245)..(245): n is a, c, g, or t
  misc_feature (251)..(251): n is a, c, g, or t
taggacaatctgaacgctcaacaacatcagaccaagggagtgatgcattaatgccatacttttccacagtcagaacatcactatcgggataaatatcnctgaatgtattattcacaaacttattattagcgatactattacaatcagagccctgtatcagcaccaatagattcttaccacctctttgcttaagatagtaagttatttcactaccatcatgacggaaaaactgnttatgtgcattngtattngagtaagcaaaacctatataacatgaaaaaagcagagcaaatgtcaaaattctctgtcgtaaattaaaataacatgcttctcattaatctctccttcaattgacatatacaaagaccccaaattgaccatattgcccctgtcagacaaaattttaaaatctaaaaacaaggttcacagttctttattccaagtgctaactaaaacacccatacctctggagagaaaaaatgccaaccactttatccacagaaatacattacctcatactattataccaccgaatctttcgctcttaatttaagggatagacaaaataccgctcgaattgtggacaaaataaagttcacaaagggatgatgaggaatgacaacccgccgaattaccatagggatcatgcaaaaccgtcatttccacttagcaatgtgggacaccccgctctt

SEQ ID NO: 4571 - DNA, 776 bp, Photorhabdus luminescens
aagctttttttatctgtttgagttaatagtttcgtttattagagatggttgggataatagaatttaaagcatttgttttatcattttcatacttatattcattcccatcttgtcaggttaaatcacatttgggtgtagggctttgttctattactcagttttaatcattataaaaatccgagcctttaaagggcttaagtctatggtgctatcccatcagagatgattttatccattatgatgcaggaatataatggctgatgcgttgcgcttatccaactttttgctattatgcacccgatgtggcttttttttacacaacgatgttatactcaaatcgtaaacttcgtccattaaataccgatgtgacgacttttgattttaagaatattaaaggaaacttcacgatgacacataaaagatacagcccctcttgggaaagctatatgggcgattttctaagaggtaactctgggattaatcatttgaaacctcaatatcagtcctttgatgctattggtcttgagaaacagttaaacgagaatacaacgtatattgccgttgctatccttagaggaagcgaaagatgttctaaaggatattgattccgcccaaccaacaagtccatctataaagaaagtgttgtcgattaccgatgctatctgaccctatgcaagtaacttacgtgaagcttctgactctgccaatgtagtacgagaatctaaaaatttatgaatcaaaggcactgaccatggtcgtaaaaatgggcaatgatt

SEQ ID NO: 4572 - DNA, 676 bp, Photorhabdus luminescens
  misc_feature (194)..(194): n is a, c, g, or t
  misc_feature (210)..(210): n is a, c, g, or t
  misc_feature (220)..(220): n is a, c, g, or t
tccctgtatcttctaccttctgaccaatacgtagtaccccggtcggagggtttgaagatcgcaatccaccttaacgtcttgagtgaaaaacaatcatgttgacgttttatattcagaagaaggagaacaatcgattcgatattgatggcgacgtcagtgaaaactggcgttggaggtagtctgacaacggtcangacggtgtaaaccgcnaacagctcanagagctggggtgcctcgtaagaactcaacctttcgccaccccgatgcacagatatcagtcgagccgcaggaagcgcaaatcaaaccgtgccgttggggttgagagatgacattcagaataccgtttcgtattgcctgcctacgttaggttacaagcgtgcggtgtcctgtcgccttaaaaaggaaatccttcgcatgcccaagtcgaatatacagccacgcaccattgccccgttccgctggtgggactttaaaaccgttcacacagaatgaaaatatcccatcctctcccggaaactcggcgatgtgaaatatctaaccccggatacttcatactcccaacttgattctcttcacaaactattgtttcccgaaatctcaaattttgtgtaccctatcctacaaatcaccacgctgccgttgtgcccaatcagtcctgccacaaaacctcacttca

SEQ ID NO: 4573 - DNA, 775 bp, Photorhabdus luminescens
  misc_feature (311)..(311): n is a, c, g, or t
  misc_feature (396)..(396): n is a, c, g, or t
  misc_feature (418)..(418): n is a, c, g, or t
aagcttaatggatcattaccccataatctggggtaatagccctgagcgattgtccaagaccaattgtcatttgacagcggggaaatgtttttatcgtggttatctaatgctaaccgggtaatattttgtatccctgggatagccaataagcgattaactaagtgactgagttttaattctgtagccgtggtgtaatctttggccgtgggcaattcaggtatccagccgtgatgtaaatagggtccggcaaatatttcttcattactgtaacctgattctttcatggcttgggtggtataacgtaatggttntgctaataccgtctgttctgttgtcatatagactttagcaaagatgtcagcggtatctttaacatcatcattcagttcaatatcnagctgtaataagaaatccgtcngttgtagccagataattgtactgacagattcccccaagttactcgtgttttttaagaaagcggccatattttcttgagccaaataattgccaccccgaattttccgcttcaccactcactcaatccattaccccccctgtaaaccgatactcgctccctgactggtatacttaaccatacctgatctcccgtgttccttttttacactttcgccgacatccgccacgacttggttctccaagtacactaccctcaccccgttacatcttacccgttgtctcacgtcgtttgcattttatttcagtatttcacatttattttcccctctccctggatcctaatgcacaccctttacca

SEQ ID NO: 4574 - DNA, 686 bp, Photorhabdus luminescens
  misc_feature (206)..(206): n is a, c, g, or t
tggagatcaccctaatcgtctgccctgaacaggattcttcttaccagctcgcgatatacaacagcctgccccccgcattattgaatgccggctatttcctgatcgctgacagccagggtaaaacaactaaacctacagttaatgtgccatcacaaactgcgacttattatcctgcggttaaaatctcacaacttatgcaaacggangatagcctgatcgcactttcaggttatgaagatgcagcatcaaacgaagtcaaaaatctggcacaactcaaacagaaaaactcaactgtctaccaacaagctgtccaagcaatacagggcaaaatgaaatgcagcaacaacactattcccgccagcgctgtcatggcgggggtttactgtgccacggatgccacccgtggtgtctggaaagccccggcgaatgtattgctaagcggaattatcgacgttacctgaacacttaatgacaatgaacaaggtcgtatgaacttgttacgcgtaatcgcctttcagtattccacacgacgtggctttttacgtgcggggcgctttcccccgcgcaaactatgcaacctgccctatatttccggacgatacttcgttaatcccaccccgccgtactctgcgcaccccctcccccccgatgggtcttaccttgcacgtctctaccctcgatctact

SEQ ID NO: 4575 - DNA, 742 bp, Photorhabdus luminescens
  misc_feature (278)..(278): n is a, c, g, or t
aagcttttgccagcttttgttataaggttcagtgaggttcttccagagctgtgtattgttggtgagttcgaggcgttgtagttggatatttctcattagctgctgttctttcagcttttttttctggcgttgtttactcattactatgatcctccaacatttctctgtctatctttaattgctcgcgagttgcactaagtaatgttgaatttcgcgctttcctgatggtccatataaggccaataagcgccagaacgagtagtgtgccagtagtactngctaatacggtaaaacgccagctgggatcgatagcccaaaaaatcataacaagtaaacacatgaggccgaaagcggtgagcagtaatgtcaggctggctatgactaccagctgtatcaaagtggctttttctttttccaactctacaacgatgagttgtaaacgagtttctattatctcgataacaacagaggcaatacgttggagaatgtcaaggacccctttaccggggccttgagatttggatgagtcgatcatattagcggtcagcttacactacccctaatacggcaccgaccacagtacccaataccgatgctaaccccaagtttatggtgaaccgagacattatcacagcccgcctatcctttgttttctaaccccctatcacggccctggttactcaaaaccccttttttgacgacttccttactttgcccgactcctcccactcccttcggattc

SEQ ID NO: 4576 - DNA, 757 bp, Photorhabdus luminescens
  misc_feature (86)..(86): n is a, c, g, or t
  misc_feature (378)..(378): n is a, c, g, or t
  misc_feature (441)..(441): n is a, c, g, or t
aagcttgaacctcagcccggatatcgaatttttttaaatgctattttagcggggtgggaatattcaccatgatattaatcggtgancacgatggacgtaacccgctcggctagcgacctatgcggctattacatcataccgcccataccgcccatgccacccataccgcctgctgcacctaaatcagctttatcatctttaggcaggtcagtgatcatacattcagtggtgatcatcagaccagcgatagatgctgcaaattgcagtgcagaacgggtcactttggttggatccaaaatacccattgcgatcatatcgccatactgttcagtcgttgcgttataaccgtagttgccttcacctgctttcacgctgttngcgataacagatggctcttcacctgagttgtcaacgatctgacgtagaggagcttccatcgcncgcattgcaacacggatacctacgttttgatcttcgttatcgcctttcagaccaacaatagccgctgcaacgcgaaccagtgcaacaccaccaccagctaccacgccttcttctactgctgcgcgagttgcatgcagagcatcgtcaacgcgagcgcgtttttctttcatttcaacttctgatgcagcacccactttgataacagcaacaccaccagccagtttagctagccgctcttggcagtttctcccggtcgtaatcagaagtggactctctgatctcgtgattgatctgaaaacaccgcctttattgcata

SEQ ID NO: 4577 - DNA, 768 bp, Photorhabdus luminescens
  misc_feature (5)..(6): n is a, c, g, or t
  misc_feature (13)..(13): n is a, c, g, or t
  misc_feature (745)..(745): n is a, c, g, or t
aagcnngcccggnaatgcggtataacggtcagccaatgctttgacagaaagtgtttcaccccccaataatagggaggttgcatcaaataccttaaggcaaaaatcggtttttattttctcagccaaatcaacaaaagatgatgctaaagaatcagcaccaggaaccaaaaataatggcgtttgatcagtacccaatgacaccaatttaatggcttcatctggcgctaaaaaagcaataatttcagctttattcgccactaccaaggcttttagttcaggggtaaaaacataacccgatataactttaaaacccaatttgccgcgctcaacaaataactgcacgcccgcagccgaagcttgccgaataatatcaataactcgcattattccaccttatttatcagcgcctatttttatcatcataaccagccttcttccgccaccgtgttacatccctgatggctttgttcagtttgttgcaactgtttacgctcaatcatcagtgccagtactgccagattagtggccgtcatgacatcggcaatgcttatcactacagcaaaagtctgttgtatctgatgtaaaaacctcacaaggttaatgagttcccttccattcgataaagacgcggctaaactcaccatgcttgacggtaatttcagtgcgtcggcacacagttgtaccaactggttttaatttcagtttccggacacgatgcatcctcgcgtatgccaggtttggctcnggtagggcagaaaatcactttac

SEQ ID NO: 4578 - DNA, 789 bp, Photorhabdus luminescens
  misc_feature (22)..(22): n is a, c, g, or t
  misc_feature (287)..(287): n is a, c, g, or t
aagcttaatgtggggtattttncgttttccaagcgaacccagaatagaaccaaaagactcattgaaattttttgaaaactcaattccaagctccaaaaattatgataataaagaagttaggttctctaagggtgaaaaaggtaatattcatcggttcgaagaaactaatgggaagtatcactggaatagaagtaccagtgatgtaaagaatccgttgaataaaaatgacattcctaatgttttattttcttttcaggaaaataagacattgtttgaaaaggaactanttaattagtgtgggagccaacaccggtattcaatattttgctaatagcagtgttgatctcaatgatatcgtttttgtgcactgggctggcgtattaacggccaattctggtcagtaggcacaatactttggaatgtgacctgtagggctggctcaagctatgtaaaatgtgatggttcaaagaatggttgagtaaaatctttctttattaaaaacattatatggatattgcgtatattcttatgaatataactatgtctttattatcagatggatgtgtcggacttttatagatgatatgttccttttgttacttggagatgtaataacgctattaaaaatacgggtatttatcgggatgaataattattgggaaggattccactaataaataccatctttcatagggatggatcgttcgactgcaaacatatgataatgggagtcaaaaaatcatctttctaggccttcgtgtctataacaacactttaatcttaaagccg

SEQ ID NO: 4579 - DNA, 836 bp, Photorhabdus luminescens
  misc_feature (18)..(19): n is a, c, g, or t
  misc_feature (33)..(33): n is a, c, g, or t
  misc_feature (37)..(38): n is a, c, g, or t
  misc_feature (45)..(45): n is a, c, g, or t
aacaacgtgtatgactanncctggggtcgtaanaganncacctgnacgtgatgcaagcttgcataccactacccattgctcctgccacatcagtattcaagtcatcaccaatatgtaagatttgcccaagcgctaaacccagacgatccgcggccaaacagtacatatcgctgcaaggttttgcgcgtccatcagggccagcttgcagcacaaatttaaaataaggggcaagaccacaggcggctggttctgcattgccattagtaatggctaccagtggcatttgttcagcaagtgccgccagagttttatgtgttgattcagggatatcaattcgattacgccaaagtgtgaaatgcgccatgacatcatctgccccccgatcagcgtcttcacggctaaaaccgtaatggcaaaacatcaactttgaggagtaccagcgccataaagtcatgtcatgataaatttcaggatgctgctcaagtgtcaattcacggaaagcacatagatcctgatgattaaggtgggtgaacctaggatcatactgccgtacatagtcaatacttcctcttctgcttatccatgactggatgattataatacagcgtatcatccagataaaatgtcatcgctaacactggcgcaagaggccggaaaaacgccttaccatttcccccgtttggttctggatgggcgacatcatacacttttgccaatgctgaaatctaaatgagataaatttgcgtggaggataggctgtatgaccaataattcctgactgtgcgccaataccattggattccaaatttgagtgccaaagagtgacccaattatga

SEQ ID NO: 4580 - DNA, 786 bp, Photorhabdus luminescens
aagcttcacgccatccagaagtcttacgcctggctgaacaagcctatatgaagtcaggagcttaccagtcactgattgatatactgccggtaatggaaaaaatccatctacatgatgagttacaaattcacaaattgcgccagcaagcctatatcggtctgatgaatcagtacatggcagaacaaggcagcgaaggcttaaaacgttggtggcatgatcaaagccgaaaaattcgccatgatgtggctttacaagttgcaatatctgaacatttaattgaatgtgatgaccatgaaactgcacaaaagatcatcttggaaagtttaaaacgtcaatacgacgaacgtttactcttattgatccctcgcttaaaaagcgaagatccaaagccgatacaaaacgcattggaccatcagttaaaacaacatggttcgacccctctgttaaacagtacacttggacaagttgctttgcgccacggagaatgggaaaaagcagtaaaagactttaaaactgcattagcccaacgtcctgatgcacatgattatgcttggttagcccatgcattggacaactacgtaaaccagaagaggccgtacaagtatccccgcgagggattacgactcactcttaaagcgtgaaagtaatcgtcctgaagagtcgttccgttcaattaccaattcggctgtcaatgcgttgaagcggtcatccctcattttcacatttttttcgcctttgatttaataattcccccttccgcggctctaatattaccatattattgag

SEQ ID NO: 4581 - DNA, 677 bp, Photorhabdus luminescens
  misc_feature (18)..(18): n is a, c, g, or t
  misc_feature (114)..(114): n is a, c, g, or t
  misc_feature (160)..(160): n is a, c, g, or t
  misc_feature (188)..(188): n is a, c, g, or t
  misc_feature (227)..(227): n is a, c, g, or t
aacggtaaactccaggcnaaaagcctgacattgacacaaggccccaaccagattgatttcaaacgcggaacccttgttcccatgacaggggaagattatggcccttgggaagcnattgataccgggttattagggggaatgtatgccaataaaatccgtntggtgagtaccgagccgggtaaggttgncaatctgaccaacctgacggcaacccaaggcgacatcantctgacggcggatggcaaggtgactctgggggatgtacaggccaaaacggatatcaccgttaacggtaaagacattgacatggtgaaaaaaagtcatatgcaagcccgtcaacatctgatatcgacaaccgatacattgcacagatggggacgaattcgtgccgacggtgatgtcactattaaagccaaaaccttgtctttagatggaggaaatatcaccgccgggaaccagcgtctgctacagggaaagaacagttctacggtgcgtggcacggatatttcaggtcatgaccattccttgattgccatagttataatacttctgtttcactagggaccagtccgaaagcccacaagtattacctattatttctagcgttaatacgctgccgattctgtctgaccagggaatatcgttttcagatacgctaataacccggccaaaatatt

SEQ ID NO: 4582 - DNA, 812 bp, Photorhabdus luminescens
  misc_feature (15)..(15): n is a, c, g, or t
  misc_feature (812)..(812): n is a, c, g, or t
aatcttggctactantcttatgcctcggcgcgtatactgtgtggaattgtgagcggataacaatttcacacaggaaacagctatgaccatgattacgccaagctatttaggtgacactatagaatactcaagcttatattggccgttattatgataggttgcggaattcagcaacgacaacccaaccggtgatgatcaccccggatatgttgagaaaaaccggactgttgccatccggattcaaagacaccaacagttcaggacagcgctatcagaccgctgtagtgcgcaatacccaggatccggcactattgcaggcaatggtggtgacacaagaagggagtccattaccttataaagccctgcgcctgatatcgatggatatctctaccggattgggaggatatattcgggatggcaagaccgctaccggcgcaatgagcacatggacagtgcctttaaaggattttgggataaacagtggtgaaggtcacctggccgtgttattgagcgcagatgagttatctactgctcgtgaggagagagatcgattgtaccgttttgctgtccccggtcgtccggagctgaacaaaatgcatactgacattaacatgggaggcaacaacctgaacaatacggctaccgtgaatgcacaggctggtcatttcagtggcgatatcccggcgaatgccggccagtttcagggggatattcgtagccacgatggctgggttgtgacgacaaagaataaaggctggttaaatgaaacctatggtggtggttgggtgatgtcggacagcaactggcttccn

SEQ ID NO: 4583 - DNA, 689 bp, Photorhabdus luminescens
  misc_feature (439)..(439): n is a, c, g, or t
ttcgagccggaagggcaaaaggttaaaactgaccggagggaagataataccggtatctatcgtcacttgttgacgggtgtttcttacatgttaccgatggtggtggcgggtggcctgtgcattgcattgtcatttgcttttggcatcactgcatttaaagaatcgggtacattggcggcggcgttaatgcaaatcggtggtagctcagcttttgcgctgatggtccctgtactggcaggttacattgctttctcgatcgctgatcgcccaggtctgacacccggtttaattggcggcatgctggcaactagcacgaacgcgggatttattggcggtattattgcgggtttcctcgccggttacgtagcgaagttgcttaacagccaagtgaaattgccgcaaagtatggccgcattgaaaccgatcttgatcattccgntatttactagcctgatcactggcctgattatgatttacgttattggtaaaccccgtcgccggtattatggcggggctaacgcattggctttctcacatggggacaaccaacgccttctgctaggagccattttgggcggatgaagcgtgctgatttgggggagcgataacacagctgcctatccttagtggcagcttgcttaactacaaaccttcgccccatggtggcattattgctgcggcgatggtca

SEQ ID NO: 4584 - DNA, 689 bp, Photorhabdus luminescens
tcgttgatagaatgattgttgagcttgataaaacactcagcactcaagttgatgaaattatgcatgccaaagagttccaagagctggaatcatcatggcgttcactgaaattgctggttgatcgtaccgattttcgtgaaaacatcaaaatcaacatcatccatgcgaccaaagaagagttactggaagatttcgaattttcaccagaaatcatccaatcaggcttatacaaacatgtctactcaacaggttatggccagtttggcggcgaaccggttgcggcggtcatcggtaactatgcgtttagcaatagctcacccgatatcaaactgatgcaatatgtcagcgcggttggcgcaatggctcacgcgccattcctctcttccgttgcacctgatttctttggtatcagtagctttaccgaattaccagcgattaaagatctgaaatctgtcttcgaaggcccggcacacaccaaatggcgtgcgctgcgcgaatcggaagattcacgttatctcggtctgacaacaccgcgcttcttgttacgtctaccttactcaaccgtggaaaacccaattaaaaactttaactatcaggaagatgtcagcaaagatcacgaacatttcctgtggggtaataccgcttatctgctggaacttgtctgactgacagcttcgccaatatcgatg

SEQ ID NO: 4585 - DNA, 699 bp, Photorhabdus luminescens
atattggccgttattatgataggttgcggaattcagcaacgacaacccaaccggtgatgatcaccccggatatgttgagaaaaaccggactgttgccatccggattcaaagacaccaacagttcaggacagcgctatcagaccgctgtagtgcgcaatacccaggatccggcactattgcaggcaatggtggcgacacaagaagggagtccattaccttataaagccctgcgcctgatatcgatggatatctctaccggattgggaggatatattcgggatggcaagaccgctaccggcgcaatgagcacatggacagtgcctttaaaggatttcgggacaaacatcggtgaatgtcacctggccgagctattgagcgcagatgacttatctactgctcttgaggagagatatccgattgtccccgcctgctgaccccgatctcgcggagctgatcaaaatgtttactgacattaacatggaaggcagtagcataataattctgttacccccaactgccccggtggttattccacgtgacatatatctgtaacatcccgccctcttcccgcgcgtattcgtactcctctcggtcgggttgttacaaccaaagctctttgttgctctcccaattccctgtgcgaaccctagtgtataccttacagtcgtcgcattccgtcttaccacgcgatatctaact

SEQ ID NO: 4586 - DNA, 697 bp, Photorhabdus luminescens
tataaagatacaacagataaaaaaacatgctctcaccaaggcatatccttagtaagagccaaagattaaggacgaacacccaaagtatgacaaattgcatagctcagttctgcgcggtttaaggtataaaaatgaaaatccttcacaccttcgcggcttaaaatcttcaccatatccattgcgatagaagcaccaactaaatttgcgctttcaggatcatcatccagcccatcaaacattctggtcatccaacttggaatacgcacattagtcattacagcaaaacgtttaagctgacggaaattggataccggcaaaattcccgggacgatttccacatcaattcccggcagttacacaagcggtcacgaaaacccaggtaaccttccaccatcaaaaacaattggggtatagcacggtccgcacccgcacaatgttcgcttaaggctaataaatcagcctgagaactctgtgctgaaggagaacttaagggtaagccgcaacggaaattatcaaatgcccctcgtttctttagcaacttaaccaatcaaacccctccttgtgggtttttcactgttttacagaacaaaacccccaaacccccttacggcaataccattttccaattacgcgggccatttggcccattaatcacggttggtatctaccaggtcaggtctccgcctccttaaaggca

SEQ ID NO: 4587 - DNA, 682 bp, Photorhabdus luminescens
  misc_feature (401)..(401): n is a, c, g, or t
atttcaaggattagaattttttcatgtttattaagaatggacgtattgactgatatctttgccgaatcgactattaatgaaaagtgtgtagaaaaacctgtttaccttatcctgttctcccggttttatagagagaagtttattggaaacaggttgttagaaaataaatttaacatgtcaggcgctttcaatagagaagtgatcgataaaacatcattattatcatcgtatacccgctcaagttcctgagtagcaaatgcggttgtcccgaaggcgagtgcaagaggggtaatcatggataacaacatgaattcggttgtgccaactagaatacggggactgaaaggataataaaaacgtgtttttagttcatcaagaattctttaataaatgacagaatnttacatgatgatcaccggattgaatacatgacccgagaaaataattaccaattaattccaatgatttatgtcaaatgatcctattggaaaagttaccaagcgcgaatcagactttatcaaaaaaggaaacaataatttaaagtgtttggactggttatattgttatgtgtgatgggcccacaaatttttaacctacacatgggtaatttaaaaatactgttcttttaggatgcggaattaagaggtatggcgtccattgcggaataaatctacatgaggaa

SEQ ID NO: 4588 - DNA, 690 bp, Photorhabdus luminescens
  misc_feature (236)..(236): n is a, c, g, or t
aatattgtatgcaatacaaagaatcagattttgactttgtgacacgtcaactggaacacgcggggattttctatttctttcgccatgaagaaaggcgtcatgtactggtattggcagatcacccttcggcgtttattaacgcaccgttagcggtattgccatatcaatcgaagatgggtgatcagcaaggctatgggctacgcgcctggcatattcatcgcacaatgattccaggnacggcggaaatgaatggttataacgttaaaagtgctgcggcaatcagtgccagcgccaaagcgaacagcggctattctaccaatcccaagctttctatctatgacgaccgacgtcaggaggaaccgtaccaactggaaacacaggcaacgctgtgcatggaacaatgcgaatcacagtcctattacgcacgccccgttaacagttattccagtttacaagcggtggattcactttaccctgaaagggcacaccatcgccgatggccgttatgccgcccgcccccattattaaagccggaaacaacctggaggaccgtaattactgctttcgcctcagtgacctcattcccgcgaataacgattttcgtccgcgttctttgttacgcgggcttaatttgcggcgtttcgccgtttggttgtagggtccccttccatgcatccctccgctaacagg

SEQ ID NO: 4589 - DNA, 779 bp, Photorhabdus luminescens
caagcttctaataaggtgatacccggatcattttcccccatatcgttccaacattggccggattgttgctcaataacggtttttgcctgggcaagtaaagtctcaaaggcaatatcatctttaacaatgggaaatagcatatttcgattattcatttgtgaactccttcgtttagggtttttatttccagactaaaatcaatacttcgtcatcgtcggcttctacacttttacctatgacatcagtggatggactgcctttttttaaagtcaaactagtgacccgttcaacccaaggtgattgttgaatcgtggctaataactggtaatagtcaatgcgattacctggtgttacgccaatagccgtattttctccccacggcatgtagattcgactcagctcctgttgtaattgatggcggccgtaatcgggattaactcctgaagcaaatatcaattcatagctaatcgggacatcaacgtatgtgggattattaatttcaatggttgtccaggggctgcttaatcgatctaaccattcgaccatttcagttaattcggcttggttcaattctgggcggagtgaatcaccattatctttgtagcgattatcagggatgacgattaatttgcgctcttctggcgcgggtattttggttaattcattggtagaaggatatttgacatcaaatatgctgataaaccgctcctttagtaaggtgacaatatcgccccatttaatgctcggctacgatgggacagcccggcgggaacccgttt

SEQ ID NO: 4590 - DNA, 675 bp, Photorhabdus luminescens
  misc_feature (530)..(530): n is a, c, g, or t
tgctatggcaacggctgagccataactatgtcaatggtgttgaggtattgcgagaacttggccgccaacaaaatggtgaaactcaaagcagacaaccgctgacgccggtggttttcaccagcatgttaggaatggcgcaagaaggcgtcgccatcaaacaatcgatcactcagttactgggagacccggtttttgttctgagtcaaaccccgcaagtctggctggatcatcaagtcatggaagtagatggcgatctactgtttaactggtactgcatggatgatgtattagcaccgggggttattgaggcactgtttgccgcttataatgcgctgttagtgcaaatttgctgccagcctgactgcatagaacagtatgatcttcatattcccccttccggtcatacccgttatgacttctggccgcaacaacctgaattgcatcaagctgaacaatatttgcgtgccaaacctgaaatacggttggcagatattcagccccctcaggatgacacgcacggttataacttntggctggcggcagaagacaatttgtcattatccctgccagaaccattaacgataacaccgaaaagtaccgatgcctgagttaactaacaacaggcattgagcgctcttggaacacatcgagcaccaagctcatttggcctgatca

SEQ ID NO: 4591 - DNA, 769 bp, Photorhabdus luminescens
agcttttctggaatctattggttctatcaggctaaagacagccagttaattggtcagtttggtgttgggttttactctgcatttattgtgtctgataaagtcactgtacgtactcgtgctgccggcgcttcaattgatcagggcgtattttgggaatctgctggtgaaggtgattacacgattgccgatattgaaaaagaaacccgtggtacagagatcacccttcatttacgtgaaggagaagatgaattcctgaatgactggcgtttgcgttctgttatcagtaaatactctgaccatattgccttgccggttgaaattgaaaccaaaaataagagcgaagaagaaggtgaagaggatacagtaacttgggagaagattaataaagcccaagctttgtggactcgtggtaaatctgaaattacagatgaagagtacaaagagttctataaacatatttctcatgattttactgatccgctgatctggagccataaccgcgtagaaggtaagcaggaatatactagcatgctctatattccatctcaggctccgtgggatatgtggaaccgtgagcctaagcatgggtggaaattgtatgtccagcgtgtgtttattatggatgatgccgaacagtttatgcccaactatttacgctttgaccgtggcttgattgacttcaaccactcgccgttgaacgtttgccgcgaaatgttacaagataactctttaccccgtatttacgttatgcatagacccaacgtgcatt

SEQ ID NO: 4592 - DNA, 682 bp, Photorhabdus luminescens
tgcggcgtgatgacttacaacaactcatcagagcggcggcagaactggaatgtgactggaataaggtactgggtgaccgcataaacctagctgacagacatcttttacagcactgggtattacagccgctatttgactggtggctccgtttgttggagccagagatagacttctggttcactgaatttgatcagctacaaatccaagaacggcaactgcatgctaaagcgcatttttggcagcaagccgaaagcgtctcgtctcaatgccgggaacaacaacataaagaggttacatctttgcaaacagcgcttaatcaacgcaagcaactattagaaaaacggctgttgacaacggaaactcatgcgcgcgaagcatggcccatctggtttactgggctagatgcactccaaactggcggcgacctaaccgcttttatgccgttcccgaacactgtcatcctgttgggcgtggttgactactttagagcatgacaccgaggcggctacttacttgcaaaatggctctgtgcccgttttctgggcctgccatacgacaattttactggcaatccactacctaattattagaggaacatgcgaactctactcaatcatttcgcccacgcgttacggcctaaacctttttgtttacgataacacaggccttccatctgcactta

SEQ ID NO: 4593 - DNA, 790 bp, Photorhabdus luminescens
aagcttgcatcctgatatcaatctgtccgtcgagtacgggtgagtcagcagtactttgcatatacagctcaaactcctgcaccagaaactgacctatccgcctggaggtggctagcgcatccggtgacgccatttttaccaacgtatgggccacttcggaatcaaaacgacgaccaaataagttgtcaatatattgggtagttgacttttctctgtgagcatcagcctgtaatgacagtaccaaaccatgtaactcagggtatgcctgtaactgactggcagcatcatcaaataacttgatagtttccttcgaggtgacttgtccggtgagccagagtcccctggcccgtccaatcaaaaacctcgcttccgggatattcgcggtttccaatcggctcataaaagcaatcagactttcactttcggtcttaggcgcttcccgttcagcggttgaattcgttcgggtcaacggggtaatctgccattcaataagacgattaatttcgttttgtgttataccgccttttaaaccgacaacacgtgcggttccatcaaagatgacgccgtgcgtaagatgttcagcatgttgaggtgccacggcgatccaaggaccccagcggattcagctcgctgagcctgtaagtgctctatcattcgggtcatttttaaaacgtacctaagttcaccctgattggtcgccccagagcaatactcctgttgggctatgctgtttgccaatccagctattggcccgtgcaagcatgcatatatgcttttcatcgaaatggct

SEQ ID NO: 4594 - DNA, 696 bp, Photorhabdus luminescens
ataacgaattttttcgtgggcttgatattcgatctgctttaataaccgggtgatatcttggttaacaccgagtgtgttgagtgtcagcagtggggcgtctttctctacccgctgcccattctgaacatggatagcggtcacccggctctgttcgtatgcctgaattatctgagaacggccagagacaatcaggcgaccggttgcggttgcctgaacatccaacttacccagataggcccagagcaaggccatgataatgccgatactgagcgtgattgcagtgtagcgggcaaaaggtgacggtggtcgttgtgacaatgctaaatgtgtcggtaaaaagtcatagtgctgcggacaagggcgcaaccaggttttaattctattcttaaacgctttaatcatgacaaggcatcttcctgttttaattcttgttgtatctgccagagcttcctgtactgtctaccggggttaagttgctgctcacgacagcccttgcctcaaattttccgcctgttcaacaacaatgatgccatcacaatgatcgaccatttcataggcgcgatctacggcgatcaccgttctgacctggacatttgctgcgttcgaaattgactgcattactgtgactcgtactcatccgccctgcgtcgttcaccgtgatgcctgaccttggcgtatcccgcgcaccaccgtcaa

SEQ ID NO: 4595 - DNA, 762 bp, Photorhabdus luminescens
  misc_feature (607)..(607): n is a, c, g, or t
  misc_feature (739)..(739): n is a, c, g, or t
aagcttaaaggtgaagatgcaactggagctgttataggtgcggctgttggtactgtagcaggtgctaaaggtggaaaaataattacagataaactggctcctgtcgttatcagtcctgtagcgtcagaaataggtggtgctatcggaggtactgttgtaggtacagtaataggcactggtattgaaaaccagataaaagaaaatggagctaaaaatggaaaataaacgaataggattaaaagcttttatcctacttacagcttactggacatcgtttatttttcttttggcctttattgcagggttagctgtacctgcattttattattttgaaaatggttattttaattatcattggaatgattttatttacactgcgagagtaggagttggtgcaggattgcctgttggaattggaatttgggtattggcgaagatagaagaaattcgcaaaagaaaatcctcttcagatccttagctacttaattccggccaatataatcgcaagtctggatacagcttgttgcggataataatgccctagctataccaatgccaccaccaccgatagccggttcaaacacgggtgaagccgtgaatgaagcanaccagacaatagcttcagctttggacaaaaaattgaaggaaatgggagagtctatagataaagccacccaatgttcttttggccgggtatgttcgtcagattatgtcgataatgaaagccaaccaaatgtanggaagaatctgacaaatgaagaa

SEQ ID NO: 4596 - DNA, 769 bp, Photorhabdus luminescens
  misc_feature (106)..(106): n is a, c, g, or t
aagctttgacgccgggatatttatccaaccagatagcaattctcgccagcagtttgatttccataaacataatcaaactaccggcaatgaaggcaatccacagatnattcgtgactaatccggcgacaaatacaaacttcatgccgaccgggctataaaccccggtagcaatggctgtcataccgactaacggcacaaagctgatcgctctggcaagcgccaccagcatggcattagccccttccccctgcgccatcagttgcaaggataccggaccttccgccagcagactgagtgacattgaagccgctaccgccgtcaaaccaccacttaataccagcaaccaaatgttattttgaatgcgctgtatccgcgtggagaataacccaaccagcgtctcattcgcccctttggccggagcagatccctcgccagctttgggaacacgctgtttcatcgcgaagtagaacatcacaatcattgagatcagcagggctatcccgttaggatccaattgcaccggtttgctcagagccccaccaaaacttaatgatcctaccgctttggtcgcgatataccccaccaatgtcgcaatcagtacccatattcctttgccatatccgtattgataggccacaacaatcgcaggaaatagtgcaaagcatgctacgataggatcgccaactttactcaggttgcccatgaaattaaccggtaaatgggcaagatatcgacaccgatcgtaacccgtcataaggcaacggataca

SEQ ID NO: 4597 - DNA, 773 bp, Photorhabdus luminescens
aagcttatcaaaatatttataagcatcgccaagggcttttcttgcttgagctttaggtacgccagcatcaatcatctccctataacttgtatgaaattcctctttcctcatatatctctctttttatcttttgtgctgcgctgatttgagcatgaggcatcctagaagttgaatgtaataatgtagcgggcgctgataagtggttttgctggttaaggggagagcatgagatgacaatagccattgaacatttgcaggacattcagttaactcaccttgaagcgctggctttggcccaactggtcaagcggctgaactgggcggagatacgcgcctgtgccgtgaatgacgaggaggcgtatcagattaaggatgccctcggtaagcttcaatctgctctggcttaccgagggtatgcgccacggtaaatcaataagaacatcggaagatctagtgattgtgaactgcttctctaaatctagtcattaaatgttgaatctagcttttgagggcagctcatctataattttattaactatccttccaaagaataggattgaaaataactaatgtctttttatctttttttataccgcacggcataactccttttttaaatatagaaaatatttcttctaatttagagtcttgattaaaagaaactaatatcgataaatgcctatcattattaacatggaattacattcgtcattactttatttaaaaagtatcgtattctatggtatcaactaacccttgtttcttttttgtag

SEQ ID NO: 4598 - DNA, 782 bp, Photorhabdus luminescens
  misc_feature (465)..(465): n is a, c, g, or t
  misc_feature (731)..(731): n is a, c, g, or t
aagcttcagtgaaggctgaaccctgcgcccaaggtttaatatactgacgaagttgtgtcagatataacgcgggatcatcctcatcctgacaaaaaaactgcactacccagggagatacgtcatcgtcttccagactgtcttgcaacgcatcttctacctggtcacgaatatcttccagacgggcagtagtgcgtccttctgtcgataccggggaaacagcataaatagcgccgactgaaagaccatcatccagcaacaaacacttctcatcgtccaaatattcgacccaaggcaggtaatcaatgatagacggccaagtgtcatacaacgcagcttcatccgtgctggtcattttgccgggacgcctcaaaggttcacgcccaacaacggtagaagacgacggtagtatgacctcagtttcacccaaaacttccgatagattatcccatttacgcaagcggactntattcaacagcgaccacatcacaatgcctccgtccgttcacccagcaaagcatattgcacctgggtgtagaacgaaaacaccgtgctgtatcccggtactggcgtgtttcccgcaactaaatgaggaaagaggtacatcaccatgtctggattgggcaaccgaaggaaagtctgactgatttcatttccctgtgtacggctataactttcatggtaattcagagtagcctgctgttcccgttccctcagctccccgggcattgttntaccgaccttaattgtagtctgtgacgaccaggctcttccctgccattaag

SEQ ID NO: 4599 - DNA, 793 bp, Photorhabdus luminescens
aagcttgtagtataagctcggcaaatctttttgttgcgcccatggtattcgtcgggcggacggctttgtcggtagagattaatacaaatttttcaactttttggttaattgctgcttgagccagtgagagggtgccaaagatattgttattaatgccctctatggtattcatttctaccagtggaacatgtttatatgccgctgcgtggtatatggtgttaatgttaaatttattgattattctagctatcttttctgaatcttttatatctcctaaaattgcagtaatcgttatattcaaatctctatctgagtttatcttttgtaactctttttctattgaatagagacaatattcggttaattcaaataggactatctgagagggagattgagtaatgatttgcctgcataattctgatccgattgaaccaccggcaccggtaataagcacatttttttttcttgatgtttttactgagtagactttgtagtggatcaacttgttctcttcctaacagatccgtaatggaaacccgctttagtgagcctatttgcgcctttggcctcacccagatcattgaaactttggaatggtgaagatttcacaaagttacttttcggagactttgtactatttcttttctattagatattgatgcccctgggtatgggtgacaataactagcttatattacattgttatactaccatggttaccctgtctgatgagaatacttacacttctcgataaatcaattcggtgacttaccattgttctccacaatgcata

SEQ ID NO: 4600 - DNA, 768 bp, Photorhabdus luminescens
  misc_feature (572)..(572): n is a, c, g, or t
aagcttatatgaggaaattgcatgtctcgacgagggagaccccccaatttcgaccgggacatcgcactcaaacgtgcgatggaagtattttggtcaaaaggatatgaaggtacacagttagtcgatctcaccgcggctatggacatcaatccaccgagtttttatgcagccttcggaagtaaaaagaacgccttctgcaaagcagtcgacctctacattaagacgatcggtgtccagtcaatgcaagcactcaatgaagcaaaaacagcacgctcagggttgcgcgcgatgctggagagtaccatcaatatcgcctcttctcatcaagctggaggatgcctgcttgtcttgggtgttgtgaacaatctaacggaaaacaaagaagtatgggcttatctcagggatgcacgtaccaaaaccctagatatgatccgtgttcgcctggagcaaggaatcaccgacggtgatctcccacccaatacaaacgtggatgtgttggcgtcgtatttccttggtttgacccaaactatttcattccaagctcgtgacggcgtacctcgtgaacgacttangcgcttgattgaacccgaatggcagctattccaggcaactgattcgaataacgattatctgcttatcacaaccgtggctatagaaactcagcatattaaagatgcctgtaagctactacaggcaccttcaccgttagctaccaacagtgcacccgctcaatgaccgcttgctaccaataaagctaaagctcgtgtt

SEQ ID NO: 4601 - DNA, 786 bp, Photorhabdus luminescens
aagcttctctgtagtgaaatagccattattccattaaaaccaatgaatcacatttttttaacaagataaaaacaattcgtattctaaatatcaagtaaatcaatggcgatcaaaggatagagcgatgaacaagagaaaagttaattggcatggtgtttttccagcagtgacaacacaatttaactccgatttttccattaatttggatgccacacagaaggtaatgaccaacctgattaaagatggggtttccggtttagtcgtcaatggttctgtgggggaaaatacatctctgtctatgaaagagaagcgtactatcgttgaactcgcattagatgttgctggtggaaaagttcccgttctttcgggtatcgcagaattgacaaccgataatgcgtgcaaaatggtctctgaatgccgtcaggcaggggctaatggagtgatgatcatgccgccactggtttatacgccaacaccgaaagataaccgagcgtatttccgtacaatagcggcctctaccgatttacccgtcatgctatataacaaccctctgctgtataaaatgatattacgccgaaattctgacctctctggccgattgcgaaaatatcgtggcatttatagattcatcaggcaataccccgccttttagtgatattcccaatgaagcgggtgatcgcttcattctttttgcctggttggatgacgtcgccctacagtcacccccattgggcgctgacaggtggatttaagtatgtccaatgcttttgcacgggaaggggagat

SEQ ID NO: 4602 - DNA, 663 bp, Photorhabdus luminescens
  misc_feature (663)..(663): n is a, c, g, or t
gttcaacccatcagaaatatgtcattatttttaatcctgtcaaccaacagtggctatcggtataatcccctttgccatatattcagcgcatttctcagggagataatcattttgaccatcaaaaaccacaactatcatatgacccgttttatcacgagcgcacctgatattcgccatctgcctcaagatatgggcattgaagtcgcgtttgccggtcgctcaaatgcaggtaaatctagcgctctgaatgctctgacgaaacagaaaagcctcgcccgcaccagtaaaacgccaggtcgaactcaactcatcaatttattcgaagtagaagaaggtattcgcctggttgacttaccgggttatggttatgccgaagtgccggaagagatgaaacgcaaatggcaaaaagcactgggtgaatatctgccaaaacgtgaatgcctgatcggacctggtgtactaatggatttcccgcaccccattgaaagatcttgatcagcagatgatccaatgggcgtcgcaatgcaataccggctttgggttgtgactaaagccacaactgcatctggtgcccgtaaaagtaactggataggtgcgtgagctttggtcgcgcttaatggggatattcaggttaattattctcattcccgaaaaattcggttn

SEQ ID NO: 4603 - DNA, 685 bp, Photorhabdus luminescens
  misc_feature (492)..(492): n is a, c, g, or t
atccaccagaagaaaatgcaacatgaatgaatctctgagccaaattattgcaagtgagctacaggcgcagccacaacaggtactttctgcgattagcctgcttgatgaagggaatactgtcccttttattgcacgatatcgtaaagaggtcaccggcggtctggatgacacccaacttcgccaacttgagacccgccttagttatctacgcgaactgtcggaccgccgccaaaccattcttaaatccattgacgagcaaggtaagctaaccccagaactgaccgaagccattaatggcacccagagcaaaacagagctggaagatctttatctgccatataaaccgaagcgtcgtacccgtggacaaatcgctattgaagccggtcttgaaccactagcggattccttgtggcaagatccacagcaagaaccagagcaggttgccactacctttgttgataccgataaaggtgtagcggataccaaagccgngctggatggtgcacgtttatcctaatggaacgtcttgccgaagatgcctcgttattggcgaaagtacgtgactatctgtggaagaatggccctttgggccgcttaagtcgttgcccggaaagaggaacaaggctctaaatcccgcgactatcttgatattatggacctatggacaattccttcctacccgact

SEQ ID NO: 4604 - DNA, 669 bp, Photorhabdus luminescens
atgagcttacgggtttcagtgatccactattggcttcggatgtggcactagattgggtcgatttagttttgtgtaccgcaggtccggctggattatatatggcaggttatacggaaaaagattatatgcgtcagacaacccatccattgttaccgggtgctattgctgagtttaaccgttatgagtttagccgtgctatgcgtaaatctgattgccaaattccgatgaaagtttattcccatattgaaccttatatggggggaccagaaaaaatcatgaatactaatggggcaggtgatggtgctttatctgctttgctgcatgatataacggccaacaatcaccacagaatgaatgtgcctaattccagtaaacatatgcgtacttatctaacatattcatcgcttgctcaggtatgtaaatatgccaacagagttagctatcatgtattgagtcagcacttcccacgattaagccgtggtttacccgaaaaagatgatcgtttggaagattttactgggaacgggtaatttaaaatttcggcaccggataaattaataaggtgccaaatttagctataaatctctattaagattgtaatgatagtagagtttatttattatagcatgattttctgctattaataaatgaaagtttttattttatttt

SEQ ID NO: 4605 - DNA, 690 bp, Photorhabdus luminescens
cacgaaccatcataatcagcccgggatcagacataatgagggcatcaggtcccatatcaatgacaggctttagatcacggataaaagttttcaatttggcattgtgaggagcaatattgaccacgacgtaaaagcgtttaccaagctcatgagcctctttaatgccgagtgccagattttcgtgattaaattcattattgcgaacacgcaggctgtaacgtggttgaccagcatatacggcatctgcgccataggcaaaagcatagcgcatattttttagcgaaccggcaggggaaagtaattctggagtaaacatggttaaaaaattctcggtttgagttgagatgagttttcactataaaaagtaaggataaggccggggattctaacgcgtattttgttgcggatacaaatttattactatgaaacgttcggttctcttgatcgatggaaagcgccttattaattgacgatgacctgtaaactgataaggtgcggtttatcatgaaaaaatactattctgactttgttagatctcgaacattcgcgctagaaccatgttcaatcgcagattgaatgccttttctgaccgccacttcattatctcaagactcgctgacgccgataacttgatatatgtctcgctctcacaaccaaatacgaattgccagaattggtggtcatcatttg

SEQ ID NO: 4606 - DNA, 666 bp, Photorhabdus luminescens
atcatccggggggcggtttgcaggttatcgacaaccgtttggcggttaagactggcaatggcatcgcggtgaaaccggaggggcttgcgttaaggctacagcccaatgggggattgatgttggataaatctggggcgttgtcagtggatggtactgtagccgtttcggcacaagcttttaaattgcttcctgaggagacgcggaaacaaattgccaagttgttattgaatgctgagacagacaacagatgacacataatagatgacggtgactgcctaatacggcttttgaggacatattatgactgattaagaaatgagtcctcgtgacttattgacagcagttttaagtctggtggttccccctatgcctgaagcattttcttatttcattgatgaggcatattgggcatatcaaatcattgatggcgataagcgggatgggccttcccattggctgggacgagattacaaatgaaaactaccctcataactaccatcgtgggcgggcaaacttgacacaaaactttgggcttgtactgaagctatatgcgggcttcttttcgcgggcgaaggaagtgaatacagagccccccatacgcttcactctccttttcttcacccatgctgccgtaactattcacatcccccttccgcggttactacg

SEQ ID NO: 4607 - DNA, 684 bp, Photorhabdus luminescens
ttaaccctaatgctgtgaaagtcgttatggataaacagggttatgcactctatttttccagggcaactattccttgggagcgtggccgttttattcaatcacgggaaacgattggtgataattttctgcgtcatattggtatttatgcctatcgcgcgggttttatccgtcgctacgtgcaatgggagccgagcccgttggagcaaattgaaatgctggaacaactgcgggtactttggtacggcgaaaaaattcatgtggggattgcattaaaggcaccgggagtaggcgttgatacgccggaagatttggcagcaattagaaaagtgtctactgaaatctgattgattgtctgaacttataccctatggattccaagatgggatcgcgaccgtaagggagcaaatccccgggagcataccataccatgtgaccggggtgagaaagtgcacccaaaacagaggcaccttgaaagatgacgggtctattttagattaacgacagcgccttcttcttttatcgctgtctatttccattgcgctttccttttcccctctatcttgccgcttcgttcacgaagctccttgacgattataaaccggctgctatgttctgatttttgtcgctgttctggcacttctcatggttcactgcttcgccagaggtgcctacagttaataccaa

SEQ ID NO: 4608 - DNA, 730 bp, Photorhabdus luminescens
ggaagaggctaacgaaggcaaactcacattgaaaactcataagaggaggttaaaaaatgatatcttcatcagtccggatgagttgaaatctatccggagtaaactgagtatttctcacgctgtttctgcccagcacctgcataccgctgagacgacataccaaaactgggaacagggaccggctaaaccccacaaacaagctgtcgttctcattaaaatggtgggacgccaccttcccgcctccaatttcttgccatcctcacctaacactatcacttctccctcatgtcgctgaccctttacttttcaccattccacgcaccgcaacccggacgaaacttccctgccatttcactactcctgatcaacccatgtcccactcaccgccacaccctctttccgctacttcggtcgcacctccctctccccccccccccccgtccatattcctcccgccgaccatatccctgtttccccgatcaccttactctcctcgtccccaccacgtatcgtaatttatatacgccgcttccccctatcttatatcctcgttccataatgttttgttcgtccctctactctctatccccccgtctatcttcctcaccccaatcctaacgctctatcacccaccactcgttaattcccactcccccttatcgcaggcgtccacacacttctccccatgtggtcctatccattgcgatttttcaccccctcctccatacaa

SEQ ID NO: 4609 - DNA, 710 bp, Photorhabdus luminescens
  misc_feature (108)..(108): n is a, c, g, or t
  misc_feature (148)..(148): n is a, c, g, or t
  misc_feature (173)..(173): n is a, c, g, or t
  misc_feature (182)..(182): n is a, c, g, or t
  misc_feature (196)..(196): n is a, c, g, or t
  misc_feature (235)..(235): n is a, c, g, or t
  misc_feature (605)..(605): n is a, c, g, or t
tcgctttttttgtcccagctactgtaagcgtccttaacctgattccactggacatcattgcggccttgaagatttttcagccattccgtaccgggagtgtgactcagnacccctaacgcgtcttccagtaactgcccctctttcactntcacatccgcattgatgcctgtcgncgcctccancgtcagcgtaccgncaacatgcactgaggggattatccaagtctcctcacggngacctttatcgcgctgtgtaataaaaaagccttttgatgtcgtgatgctctgctgagaatcaatattgggcatcgacttgacgttcaccttccctgcctggctggcgaccttcgcttttctaccggttcacatatgactgtctaccatgtctccttctgtttcgccctctagtgcatatcaccccccggccgcaaatgcatgacctcgcggcgttttctcgatttccgccgcatggttccgctcgacacccaagcacgtttgtttattttttccggcgtccaaccgttaccagccgtcttcttcattttgtcttctcgtggcctgcttctgtccgccccgtcttaatacaactccctcttctaaactgangttagcacagctccccggatataaatcagcccgtttcgctggatatccccaactggccccggaattaaatattgcattaccgtatcttctcccgccacacgtgca

SEQ ID NO: 4610 - DNA, 698 bp, Photorhabdus luminescens
  misc_feature (276)..(276): n is a, c, g, or t
aagctttctgactgaagccgtcacttgggattgaaaccatcaaaaccacctgcttactgaaaaccgtttcttacatcagtggcagcgtattctcagccaacagttgactaataagcttcgcggcacagaaaagccggtttaatcgcaggacagggaatcgattttgtccagaaatttacctccgcgatcctcctatggtggggggtgaccgaagtcttacgcggtgaactgactccggggcaacttatcgccttcaatatgctggccggacacgtnacgcaacctatcctccggctggcacaggtttggcaggattttcagcatacgttaatcgcgttgaaacgtgtgggggatattcttgatgagccaatggaaaacagtcaacagggattggcttttgcacctgagctggaatgccaaattgaattccaaaatattcgctttcgctaccatgaccatacaccggaagttctggcgaacctgtcgttattgataaaattcggtcaatctattcggataactggacccgctcggctcaggtaaaagtacttctacccggctgctacaaatggtctccttaccttaacatggacaagttatgattgatggcctggtttaagttattgctgatccctactcttacggcccaatatgatcgcttggctccaggaaagtcccctgtttcctgcacaatacca

SEQ ID NO: 4611 - DNA, 766 bp, Photorhabdus luminescens
  misc_feature (766)..(766): n is a, c, g, or t
aagctttgattagtattccacagtctgaaagaggtggtgagattgctcaacgagggtttgactatcagacctgttgggctttgtctcaaatgttggaatatgaactggatggaaaaaactatgtatttatcttcgagtatcatgatgatgttctaatattagatgatgaatactctccaacagacctcacttttgctcaggtaaaaaccagtgaatcacattggactgcttatgatttacacaaaagcacaaagagaaaaccaatatctataattggcaagctatttattcaccatagaaacttttgtaactactcgcctcagctattgtttgtgactaatgcgtcatttaatttatgtgagaagaatggtggtaaatctttatttagtgcaagtgaaataaaagatgagcataagattagcttcaaacaagcaatcaaagaccaagtgaagctcgatgatgaaaacattgatctttctatattgaagtttgttcaatcctcattaagcctagatgaccacatcacacacttaaaaggtaaactgtgcgatttcctttgtaataaattccgtgatgacactacattaagtgtaaatgtgcttgcagctttgcttgaaaagaatgtagaaacacatctaaagtaaatcagctgatatcgctgatttttcgaccttatatctcgaaaagggttttcattcccagcatttaatggtggtctagactcattgaatgaagtattatatgaagccgattggaaatggcgaan

SEQ ID NO: 4612 - DNA, 780 bp, Photorhabdus luminescens
  misc_feature (598)..(598): n is a, c, g, or t
  misc_feature (765)..(765): n is a, c, g, or t
aagcttctgcactcccctgttccgctgttggcagaatctgtaacaacatcccaccagcagcaactctgccatcttgaatgccagtacgaataaagagacgagtcggtagctgttcagactgtctgaaataatcatcaagacaatccgccaatgtttcaccttccagtgcaaccactccctgataacgctcaccatgagttggcgtaatggtaataaccatatagcctgtacccaccatctgtttcaagctgctattttcagccactaatccatcaatacgagcaacaccacgcatttgttgctgatgattaccattaataacggctaatttgaccgggccatctccctgaatctggaccgtaatatcgccatcaaatttcagggttgcagttaataggctggttgctaccaacagttctcccaataattgctgtaccggctgagggtaatcatgattttccaaaatatgctggtaagtttcactggctaaaaccagctcaccacgtacagaataattcttaaataaaaagcggtgtaattggtcttgtctaaacataacaatctctcattcgagcaggttattcctgcccatttaatntggtgtttttaaaactaatcagcgtgcgtctttcctttttatccggccggcgatcaggatgaggcatagctaatgcattcatttttccagccattgccattctttcccggctagtcatactcgcttccgtctcttggtaaagttgttgcgcctccggccaccgcggngatgattgcttagtc

SEQ ID NO: 4613 - DNA, 680 bp, Photorhabdus luminescens
tctgaccaactgcgacatagacacattttatgcctgagtcacgttggttaatgattgcgtcaatagccagtgctgttttacccgtctgacggtcaccgataaccagttcacgttgaccacgaccgatagggatcatagcgtcaacggatttataaccagtttgtaccggctgatcaacagattgacgatcaataacaccaggagcgatcatttcaacagcagagaaaccatcatgctcaacagggcctttaccatcaattggctcacccagcgtgtttactacacgaccaagcagaccacgaccaacaggtacttcaagaatacggcctgtacatttgaccttcataccttctgctaagtcagcatacggacccattacaacctgacctactgagtcacgctccagttcaatgcgattgcataacgattgccaggcagtgcgatcatctcaccctgcataacttgcgctaaaccgtgaatacgaatgataccgtgcttaacggatccaatcgaccttcattgagagctttactcattacattggactgagcaacgcccctgttgattcgtacccctatctcggtggaattaagttgctcatgttcagcccccttaagactggaagacgcctgtatagcgcatttaaccggtaccaatactgccctcggagaccaaattac

SEQ ID NO: 4614 - DNA, 764 bp, Photorhabdus luminescens
aagcttctttttctttctgggagacaaaatcagtttcggtttttttaatccctgcatcagcaaattgctgtaccaagcgatcaaccgaagtctgtatctcttctgccagtgattttacggttacatctgtcatgctgttccttcctgctacggtttattacgcatcatcgccaaaccaacagatatttcgggcagccatgatgagctcgcctgttttctcatcattcaaaccttcaatatcagataggtcgtcgataccctgctcggcaagatcttccagcgtacagatgccacgggcagctaggtcaaatgccagagtacgattcataccagtcagatttaacaactcttcagttggttgtttatcactgaggctttctttctgagccagttccagagtagttaaagcagctttcgcacgttcacgcaggacttcgatagtttcctcatcaaggccttcaatttctagaagttccttaattggtacataggccaattcttccagagttgagaacccttcttcgactagaacagtagcaaattcttcatcaatatcgacatgcttagtgaatgtatcaatacaagcatgagcttctgccctgatgtttgcttgtaacctcttaagagcctgacatgtaattgccattcgtgattaccaccatgttttttgcacaactgccagtcagccgcacttttggccctactgcccatagcctgcgctagtcgttgttttaccgtgccatccacctcacttggctgttcaa

SEQ ID NO: 4615 - DNA, 767 bp, Photorhabdus luminescens
aagcttcggttgcttcgattgttgggaagagtcgtcatgttggcaacacaataggctcaagcaaaacgaaagaaactcagatatggacagaaacgaagaaaaaagagcctgtagcaaatgcttacggccactgggataaacataaaagtgaattccctgaatatcagaattcaaaacaatatgtcgaagccacccataattttattaaaaatcctccaaaaggaactttagtcaaaacccgagctaatggtgataccttgtattacaatccaaaaacaaatatttttgcagtaaaaaatgtggataatgtcccgaaaacaatgtttaaaccaaatccagtagatcatggatatgaaacaaatttggattacttcaatgcacaaaaataatagattatatgtatgccgtgtgtgtggtgcagaacagttagatcctccgtggggtgaagatggtaactcaccaacatttgatatctgtgattgttgtggggtagagtttggctatgaagacgctattttagcagcattaaagaactatagatccaaatggttcggataaggcgcaaaatggaactctgaaaaatccaagccaaaaattggtcgctagaggagcacttatcaatatacctaaagaatattcgtaaaatttaagagtatgcaaatggatttgggcgatctcttgctatcaaatgaccaactctcctgcgttagcaatacgctaacacagggaatttatagcccatcatatccaaccagtaaactgggtga

SEQ ID NO: 4616 - DNA, 773 bp, Photorhabdus luminescens
  misc_feature (270)..(271): n is a, c, g, or t
  misc_feature (489)..(489): n is a, c, g, or t
aagcttatttctggtgaagttaatttagatcattctggtggaatatctagagataaaatatcttctggatatatactgacttgctgctcatacccgaaaagcaacattgaaatataggaaaaaaatgaaatatatttatttgtttttatctataataatgtcatcaaaagcatattcatttgataacatgaaactcagctttgttgaaggcggtgatttttacgttggtagtgtgtttggcgctcaaaattatgaatctcattctaatgnnacattaaattctttttatatcatgaagaatgaagttacttattcagaatataaagaggtatatgaatgggctatattaaatggttatgattttgatgatggatgtaatgggtcacattatgaagattgtcttcctcctgagcaggatgaaggcaggcatcctgtgactagtattaaatggttagataccattcttttttcaaatgcattaagtgaganattaaaactcactccagagtattttcaaaaaggaaataacattattagaaaaaaagacaaaaacttagagatctttataaatacaaacgctaatggctatcgtttacctacccttaatgaatggcatgttgcaacaaggggcggagaccttgcttacgattaggaagatatggatactatcactctggaagcaatgattctaagaaggtggcatggtatgcacagtttattccagtttattttggaacacaggtgttggtaattattcttccacgacttaaatt

SEQ ID NO: 4617 - DNA, 765 bp, Photorhabdus luminescens
  misc_feature (765)..(765): n is a, c, g, or t
agctttataattaggattatcacctggataataatgatattatgccgtcagaagtccttgcatcttggaacacccaaataactccaacataatcccaaaattgtgtcataacatggagccttagtggcttaataacgctatgcgggcctatcactggaacgtgtacaagtacatcagtcaaatcaccatctgccttgatcatataatcagtctgcaaatttcctccagataagtttatatcacacatgtcacctatgtaattactgagtacataaacatatgtagaaacttgtgaatcaatgagtttttctaattctactattttttcttgcatttcattcacctatgttattagtaaattaaacaaaaaccataaaaagattttgaataaatttaatctttgcattcaaaaacacaatacaaatccaaaattaattaatttgataaactaatcctctaagtacctcctcaagattgaaatagattgctggtagtaaactttatcttctattcgacgaaagcatgactatttttattcatcatattacgttgttaattaaatatagccaaagttctattccttgccactaaattttaaaattattttatgacatcttatccatcttcatattgaaatactaaaaacccataaaatcatttattaaaaaaattaaattcagtgaatcattcttcttttaacaccaataaacaacataaaacagaataataaataagattccaaaatagtgctacatctgataccan

SEQ ID NO: 4618 - DNA, 769 bp, Photorhabdus luminescens
agcttccttcaagatctatagtacaaatcagcatatatggcacggtaatgttaagaagattatgtataaacccgatctcattaataatgctgtttattatactgtgctatttgatgtccctaatgataatttcctgcttaaacccagtatgagtgcggatgtcactattgtgacccacgaaagcaccggagtagtgactatacccagtgatatactgaataataaacggcatcaacctttgaacgatgatctaactacctattttttacgtgagatgaaagatggaaacatcgtagtaagacaattattgatcggtcataacaatggaaggcgttcagtcgttgtcagcggattgcagagtaacgagcagatcgttgtactttccaaacaagataatcttgggaagatccaaaatgataacgctaaataatatctgcaaaacctatggtaatgagggtaaacaacatcttgtcctgaaagatatttgcttaaccatagaccaaaatgattatgtcgctattcttggtcgctccggttcacggaaaagtaccttattgaatataataggacttttggatatcgccagtgcgggagaatatcttattaatgatctcacggcaactcagcaaaagattcactcattggcgcttttacgggcgaaatattttggctttggctttcaaaattataacctgttggaaaactaccgcattgatgaaaacatttgatgccatgtactacttacaaagaacttggattatacagagaa

SEQ ID NO: 4619 - DNA, 755 bp, Photorhabdus luminescens
aagctttactccgtatccctgataaagccactcgcgacgcgctgatccgcgacaaaatcagtaacggcaattggcattcccatctgggccaaagttcatccatgtttgtcaatgcagcaacctgggggctgctgtttaccggcaaactggtttctacccataacgaagctaaactttccaattcactgaatcgcattatcagtaagagtggcgaaccattagtgcgtaaaggcgtagatatggcaatgcgcctgatgggtgaacagtttgtgaccggagaaaccatcgctcaagcgctggcaagtgcacgtaagctggaagaaaaagggttccgttactcctacgacatgctaggtgaagccgctttaactgaggaagatgctcagaattatatggtttcctaccaacaagcaattcatgctatcgggaaagcatccaacggccgcggcatttatgaagggcccggaatttccattaagctttctgccctgcacccgcgttatagccgtgctcaatatgaacgcgtcatgaatgagctatatccacgcctgctttccctgacattacaagcacgccaatatgatgttggtatcaatattgatgcccaagaagcagatccgctggaaatttctctcgatctgtggaaaagctctgcttgaaccccaactggctggctggaatgcatcggtttcttattaagctaataaaacgcgcccctttgtatcataccgtattgactagaaagcgcaccgcgc

SEQ ID NO: 4620 - DNA, 753 bp, Photorhabdus luminescens
aagctttggagatcaccctaatcgtctgccctgaacaggattcttcttaccagctcgcgatatacaacagcctgccccccgcattattgaatgccggctatttcctgatcgctgacagccagggtaaaacaactaaacctacagttaatgtgccatcacaaactgcgacttattatcctgcggttaaaatctcacaacttatgcaaacggaagatagcctgatcgcagtttcaggttatgaagatgcagcatcaaacgaagtcaaaaatctggcacaactcaaacagaaaaactcaactgtctaccaacaagctgtccaagcaatacagggcaaaatgaaatccagcagcaacactattcccgccagtgctgtcatggcgggggtctactgcgccacggatgccagccgtggtgtctggaaagccccggcgaatgtcgtgctaagcggaattagtgatgtcactgaacgacttaatgacgatgaacaaggtgccatgaacctgctagggattaatgctattcgctatttaaacgggcgtggctttgtcgtgtggggcgctcgtacgcctgaagatgatgacaactgccgctatattccggttcgacgttctctttaacagcgcagagcgggatattaagcaagctatgcgcaccgccgtttctgaacccaatagccaggctacttgggaacgggtgaagtcagccattgacaactatctctattccttatggcagcaaggggcattagcggga

SEQ ID NO: 4621 - DNA, 782 bp, Photorhabdus luminescens
  misc_feature (467)..(467): n is a, c, g, or t
  misc_feature (635)..(635): n is a, c, g, or t
aagcttggccggcagtcgttacgacttagttgaaagaaataataatattattttgaattatctgaaaaaacagcaacattttaggttactggtccctgtaatagaaattagtagttacggtggtgaagttaaaccaatacaaattcaatctgatactccattcaaaaatgtgacttgggatatacctgaattattccagaagaatggcgggatgataaatatagaaagtactcatggttataccattcagttaccggaatatcagcctgatggaaaaaatgactatactataacaggtacaagtaaagatgatcagctgagggtgcaaatacaagctcatgtattacaacgtaatatctctttgagtgttaatacaaccgatcctttaattgctgatggaaatgcgaaatatgtctatacagctaccctgcttggcgctgacaaaaaaacgccgatagaaaatgccnaattgatttgggatacggataataaagatcctggattgaaattaaagcctgattcacaagcaacagataaaaatggacaacagactggcacattaaccagtccaacgccattttccgatatacaagttaccgtcaggattaatgggcgaccgtgttactacggataanaaagtcagttttaccgactccagctgctgctatcaatcacccgcgtgaccgctggtgtggataaatacattacccgtctcattaccgttgttgccggttatcctttctcggtaaccgtggcagatcggcatggcaagcccgttggcg

SEQ ID NO: 4622 - DNA, 781 bp, Photorhabdus luminescens
aagcttaacggtaaactccaggcgaaaagcctgacattgacacaaggccccaaccagattgatttcaaacgcggaacccttgttcccatgacaggggaagattatggcccttgggaagcgattgataccgggttattagggggaatgtatgccaataaaatccgtctggtgagtaccgagccgggtaaggttgtcaatctgaccaacctgacggcaacccaaggcgacatcagtctgacggcggatggcaaggtgactctgggggatgtacaggccaaaacggatatcaccgttaacggtaaagacattgacatggtgaaaaaaagtcatatgcaagccggtcaacatctgatattgacaaccgatacattgcagagttggggacgaattcgtgccgacggtgatgtcactattaaagcgaaaactcttgtctttagatgggggaaatatcaccgccgggaaccaggttctgctacagggaaagaacagttttacggtgcgtggcacggatatttcatgtcatgacattaccttgattgcaatagtgatcttacttgtgctgacctagggacccgtgcgaaagcacccagtgttacctattatttctgcggtcaatacgctgccgattgtcgtctgaacagggtatattccttctcagatgcgcttacttatccgggccgaaaatatcttattggcgaccatgggttgcactgcagttaaccatgtttcggtggcggatgaaatattgatcttgcctctcgacgggggacacacctggatg

SEQ ID NO: 4623 - DNA, 778 bp, Photorhabdus luminescens
aagcttgtctgcgcgctaaaattgatatggcatccccttttattgtgatgcgtgatccggttttgtaccggattaaatttgcagagcatcatcagtgtggtaacaaatggtgcatctacccaatgtacgattttactcactgtatttctgatgcgcttgaaggtattacacattcgctgtgtacgctggagttccaggataaccgccgcctgtacgactgggtgctggaaaatatcaccattgattgtcgtccacgccaatatgaattctcgcgtttgaaccttgaatatacggttatgtctaagcgtaagctgaatctgctggtggcagataagattgttgaaggttgggatgacccacgtatgccaacgatctcaggcttgcgtcgtcgtggttatactgccgcgtctattcgtgaattctgtcgtcgtattggtgtcaccaagcaggataattatgtggaaatgggcacattggaatcttgtttccgcgatgatctgaacgaaaatgcgcctcgcgcaatgggcttgtcttgatacgggccgattagtgatcgaaaacatgccagagtgggagcagattttgagtatgccttatcatccgaaccaaccggaaatgggcagccgtgaagtgccatttattcttgagatctatattgaccgagcagattttcctcgaaaaggcgaatcgtacatataagcctctcggctttgggttacaaaattctcctgcttaccgcctatttcatcaaagcgaacccgtctatcaaaagctgtca

SEQ ID NO: 4624 - DNA, 683 bp, Photorhabdus luminescens
  misc_feature (386)..(386): n is a, c, g, or t
  misc_feature (390)..(390): n is a, c, g, or t
atttcgtccaaatcggtaaaggtctcaccatgaccgatgacgatatcaagcagggcaaaatgattgtcaaagtgggtctggcggcggttcgtccagccgagtttattatcttgcagtttacgcaaaacatcgctcaataatcggaggcaacatgccaactacaccaacttatcctggcgtctatattgaagaagatgcctcactggctctctccgttagccaagggaacacggcaatcccggtttttattggccgtttctcaccgaaaaaaatcagcgcaacacctgaaataacacgcgtgagtagctggttggatttcactaatctgttcaatgtgggttgtattaggtcggtagcaatcaaatcaactgagtctactccacccncttncctttctgttcctgagaaaagcgaaggtaatgcagataacaaacacaataatgtaaaagacataagcaatgcaaaaattcaacacattgcagaaaccaaaaactatgccgaaactaaagctaatgcagaagtccaggactatgcagcagttgtccctgtaccaagcctactcacatagacggtaaaagcccccattacattcatcaggtgattacccgtacctacacgacaagcagtgatgccttaaagctttatttccaaaatggtggccggaccttgttatatcctcgcca

SEQ ID NO: 4625 - DNA, 677 bp, Photorhabdus luminescens
  misc_feature (139)..(140): n is a, c, g, or t
tctacagcataagtgctttaagcgagcgttatacacgtgtgggggtgttgcagtttgatgctcatcctgatttgtatgctatggggactccctgcgatttgcagcgtagtgatgctaatgtaatgcactgggttcgtcnnatgccccatgttgaatcaatttggcagattggtattcgggattatttttgtcaacctactgaaaacctccagttagaagaggatcctaagttccatatgctgtcggcttttgaagcagagaccgtgggctacgagcgcctattgaggaatatggatggctctttacgcttggcaattaagtatgacggggatgtgcttgaccgagaaggaagtactgtagacagaaacccctgtactgggtggcctgaattactatcctttgctggcttgttaagagaggatggtaagcgaaatcggaattgtgggtatggagatagtcgagaatggggatgcttagcaaggtgccaacggaggagcggaagaggctggctcgaaggtaatcgacattacaatcatttgaacaaggcgaaggtggccgggccattgattatgcaccttgtgataaagggggacggaggcctattatgttgtggacgaaaaaaaagggggcaagaattaaggggggtacggactaaggagtggtcatatattgaggga

SEQ ID NO: 4626 - DNA, 685 bp, Photorhabdus luminescens
  misc_feature (314)..(314): n is a, c, g, or t
  misc_feature (685)..(685): n is a, c, g, or t
ttagggcctatatgtatagtaattctgctttagtcaaagattatgaggaaatgcttaatgctaagcgtttcccaataaagattgcgttatacattggcgaaagaatcactgttaccgcagatgcaccattgcttgttgaagataaagatgattatggcgaacccgttgtcttggtatatgaccagataatcattgaaccgggaggtcaaattatttaccgcactaatggtaagatcgaagctaatactattgtagggaacagcaataatgataaaaagcagagcattatcagtaaaggctctgatggaggcganggttttgagggtgaacagggaagtaatggggttaatggcagcaatggtaatattggttcagagaataaacatggctgctctgttaaatccacaccatgtactgatgcaactggcgggttttcgggagcaccatggatggatggcaaaagaggtggcagtgcaaatgacgtaattattaatgttgaccattttcctggagtagtcaatgccggatcgataggtggtaacggcggaaagggtggatatggcggtcatggccgacatggagggaatgggtgcaaatggagaagctgtaacaaacaatgtattgctggatttcgaggaaggcgacgtgatggctgcaatggaggacatggcggcactgcgggtan

SEQ ID NO: 4627 - DNA, 673 bp, Photorhabdus luminescens
  misc_feature (250)..(250): n is a, c, g, or t
  misc_feature (265)..(265): n is a, c, g, or t
ctctgtagtgaaatagccattattccattaaaaccaatgaatcacatttttttaacaagataaaaacaattcgtattctaaatatcaagtaaatcaatggcgatcaaaggatagagcgatgaacaagagaaaagttaattggcatggtgtttttccagcagtgacaacacaatttaactccgatttttccattaatttggatgccacacagaaggtaatgaccaacctgattaaagatggggtttccggnttagtcgtcaatggntctgtgggggaaaatacatctctgtctatgaaagagaagcgtactatcgttgaactcgcattagatgttgctggtggaaaagttcccgctctttcgggtatcgcagaattgacaacccatcatgcgtgcaaaatggtctttgaatgccctcaggcacgggctaatggattgatgatcatgcccgcactggtttatacgccaacacctaagaaaaccgaacgtatttccgtacaatagccggccttaccgattaccccgcatgctatatacaacccttcggtgtataaaattgacttacgccgaaaatctgaccttctggccattgcgaaatatccggtatttaagatccatacgcttacccccctttaccgctttcccataacagggctatccctccttcttttttcg

SEQ ID NO: 4628 - DNA, 680 bp, Photorhabdus luminescens
  misc_feature (78)..(78): n is a, c, g, or t
  misc_feature (186)..(186): n is a, c, g, or t
  misc_feature (189)..(189): n is a, c, g, or t
  misc_feature (263)..(264): n is a, c, g, or t
  misc_feature (280)..(280): n is a, c, g, or t
  misc_feature (309)..(309): n is a, c, g, or t
tcagaattatctcgtgttacaaatattaaattatcagtaatattctcctcccatttttttattttcttcaatactatnttatcatcagtatagtcattcactattaactcagcatattgaccaagctccttagcaattgtttcatttaataaggaaccatttgtctgaataattatttttgcattngtntcgttttttattttttgagcccaatctataattctcttatccatcaatggctcatttctaaaaaacaaactganntaaccattaaagtctnttaactgctccactattttatcaaatagntcttgctgcattctccctctgctcatctcgactcctattagtgggacaaaatgaacatgaattctcacagcccattcttgtctgtatcccgataatctcacgcgaatctgcccctctacttaatcacttactccgctaaactaaaatcgcctgttgaattgcgatttgatcacctagctacttatacccctccttggtccccgatcaccgtccgcttttatgagactaaaacctcggcgactgttactgtccctcgtaatacggatcccgggcacaaccccgtttacgagattcggattactattcaccatcacgagatgacccgtctgcacccttgtgatcaccctttctgtttgcacgcgctatttgct

SEQ ID NO: 4629 - DNA, 683 bp, Photorhabdus luminescens
agtcccgtttgatagcagcctcggctaactcacggcgcagcggttctgacacttcagcccagtgcggaatgcgaatgcggcgcaggtactgagcttggaagcgtaggaatccaccccgcattttcgttgaataggtcgccacaaacagacgagtgaccgcggatagcaggacagcctgtaaggcccgtaaatcccagtcgtctgacgtgacttattagaggtcgtggcgaggatacagcccaccatcttcatagacgatacgcgcctgtcccttgatatctggaatcaggagccttggcctcgcatccaacgacggggccatgcccgccattgtgcgatacccgttggccgcacctttttggcgctagtgacaccccaccatcctctttcgttgacccttacggtcccgcctgctaccgccgttcttccaaagatccacccgggcctattccctttcgcccgggtcggatacccccccagcccgccccagtccatttttgatgtccctcatgcccctttcatatcctccgacccgtacgtcttttctacacatacagttcaccgcagctccttcttcaccctgcctctcgctcttcccccacctcgcgtttcctgtcccctgatctgtcttccccggatgctgccctagtgacttccatgccgttcttcgccccctaccatca

SEQ ID NO: 4630 - DNA, 668 bp, Photorhabdus luminescens
  misc_feature (207)..(207): n is a, c, g, or t
  misc_feature (262)..(262): n is a, c, g, or t
  misc_feature (278)..(279): n is a, c, g, or t
ttaaaaagctcttttaaatttaggtttagagcaaacaaaaaagccacgtttttattaaataatgtcctatcttgttaatatatttttaacatatttttcgatcaattttattaacaagtaggatatctcttactttatattccatatttcagagcaaaatccgacataaatctcatttctcataattaataggctaaaatgaggatnaaacctattgacttatttctatttatattcgatgtttttttatggaaaaaatatnttaaaataataaattnnataataacggtaatatatacccaatggatttcaacatgcatcgcgacggcaagggagcgaatcccctggagcatagataactatgtgacccgagcgagcgagccctatcaactaatacgcaacttgaacgatacgggtactataagtatcttttcccacgctccatatttaacggtactaatgaagggtaagaaaactaacctcatcatactgtcatctaaccttcatctccaatattaaccgaccttatatttatttaaacgtcgaactatcacatctaaaaatacggatcactcttgaatgcgatagacatgtctgatgatcccaccgcgattatggctgtccctgcataacgatcgcgctatcgtaccattgttccaccaccttcc

SEQ ID NO: 4631 - DNA, 685 bp, Photorhabdus luminescens
  misc_feature (143)..(143): n is a, c, g, or t
  misc_feature (197)..(197): n is a, c, g, or t
  misc_feature (240)..(240): n is a, c, g, or t
  misc_feature (262)..(262): n is a, c, g, or t
  misc_feature (271)..(271): n is a, c, g, or t
taaaatcatttttggcactcatatacatttccttaaattaaataacatgatttcatcataaacatattgaactatcactaaagatgatttctcataattcacatcaataatagactattcataaaaacaacaatgaaatgttnttataactaaaaagattaactatttttatataattggcaacaatcaatagccgncgaattataatcaaaacattccaaaactcattatattcaattncataaattaatatttttcattnctttaaatntcaccttcaattctttttttaagttacgaacataacattaaagtattttaattataacaccaacaaaatggactgagtaaaagaccacctcgccaataggtggtcttagctgtcattccgtaactatatctgtaacgtactgatttaacatcggttgcataaaacgcatccatttattaatttttaattataacaacaaatgaccaatgcccgtgctgaatgtttgcttaagataacacctcaaatataaaaccactttatttttgcaattggaaccattatcaatattctcgtgacaacctaaacattccaatcaacttaggacctactcattactgtattccgtcacacctaattcttttacaccaaattatgcccttatgtcgtactatccgtctgcccatgtccctacct

SEQ ID NO: 4632 - DNA, 683 bp, Photorhabdus luminescens
  misc_feature (357)..(357): n is a, c, g, or t
taaaccgcatcacatcagagaaaatgggtatgacaccgtaagcgcccgccggaactctggccgccatatcttccagtaagctataagtatcaacgccaagacgctccgccaacagcttttcttccgcgcaaaatgcatccctaaaccaacgcatggttaagccagtaaagaaactaatcgactccgcctgaaccatgccgggaataacatgaggatttatccgtgtattcatatttgggtcagtgaccggttcaggcagattaacaacctgctgccaaaatgtgccaccaataacggcggtctgggcaggtttgaccacacctaaaccaagacagccgagctgtacatcaccaccgnccataatgaccggtgtgccaatattcattccacattgaacagcggctttctccgtgacgtaacctaacaaggttcccgtctcttttaccggcgaaagaatatcagaacgcaatcctgccatttgcagtagatcgggacgccaatcacggcttaccagatccagcatgcctgtcgtaccggcattggagggatcgactgccaactcaccaatgagcatatttgccagccagtcgctgatcatggttaatgccggcccctgatgatagatattccgcgcgatgatgacgtaactataacaaacgacgcattgcaccccacgctaatgt

SEQ ID NO: 4633 - DNA, 752 bp, Photorhabdus luminescens
  misc_feature (29)..(29): n is a, c, g, or t
  misc_feature (745)..(745): n is a, c, g, or t
aagcttttcctcgatatcttgtttagaancaacaattttaacgccgcctttggcggtaatagtcagtgggctatctggtgaggtaattaatgccagtggatcgttaccccataatctcgggtaatatccctgagcaatctcccaggaccaattatcgttcgacaatggcgtaatagttgtgtcgtgatgagctaatgctagccgggtgacactctgaataccgttaatcgccaataatcggttaaccagatggctgagatttaataccgtagcgccggtgtaatttttggtttgaggtaatgtcggtatccagccgtgatgtaaataagggccggagaatatcttttcattactgtagcccagatctttcatggcttgagtggtatagcgcccgggcttttccagcaccatctgttccgccgccatataaacctgagcgaagatatcaggaatatcgatgacgttatcattaagttcaatatcaatctgcaagaggaaattgatgggttgcagccagataattttgctgacggattcccccaagttacggttattttttaggaaatcgttgagcttctgctgagccagcttattatcggcctgagtttcctgaccaggaagtaaataaagccaataatttcctctcaaggtaatttgccgccgcacccaaatcgttaaggtatatttacgttcctgtttgctataccaatatttatagcgttgttcttcaagttcacggatcagntggacat

SEQ ID NO: 4634 - DNA, 764 bp, Photorhabdus luminescens
aagcttttgctaaagagcacagttatacaaaattctcaatggttcgctttggcaacgtccttggctcatccggttccgttgtccccctattcgaaaaacagataaaaagtggtggaccgataaccctcactcacaaagacattacccgttacttcatgacaatcccagaagcggctcaattagtcatccaggcaggagcactgggcaataatggcgacgtctttgttctggatatgggagaatcagtaaaaatttatgatctcgcccggaaaatgatccatctttccggcctgacagtgaaagatgaaaccaatcctcatggtgatatcgaaatcaaaattaccggattaagacccggtgaaaaactttatgaagaactcttaattggtgataacgtctctggcactaatcacccaagaatcatgacagccaatgaagtttttctgacctgggataaattaaacccattattaaatgacttaaaaacatcttgtgaaaattacgatgttgaaaatattaggcagatcctgattaacgctcctattgattttcatcctaaagattatatttacgatcctctaaaataatacttacaaatacactcatgtcatgaaactggctgaaaatcatattaccgacatcagccttgtagaccaataataatcctatgaaaccgttaacacacgacaaattaaaatccaattattcgaaaattacaataaccagctaacaaaaacctattattacattacccttggatttca

SEQ ID NO: 4635 - DNA, 648 bp, Photorhabdus luminescens
gctgccgttgtccggtccccacaggagaacgcctcgttcttcaagatgcttgagattatgttgcgttgcttgagctcgaaacatttgttgattcattgcgggtacggcggcaattggggctggggaggccaaacaaagagttgttacgagatcatttgccataccgacgaccatgcgtgccagtaaattatcagtagccggggctagaataatcacatcagcccatttaccaagttcaatatgccccatagccgcttctgctgctggatccaacaagtcatcggaaacgggataaccagaatccgcgtgcaacgcccttggtgtaataaacgattctgcttgtggcgtcatcactacacgtacttgtgcgccccgatctcgcttgcgacgtcctacctccggagttctgcaagcggctattactcccgctgtaccaatcccatatgcctgccggacagcctgccctcttattgtcctttttataaccgtcatcggcgtttttttcccctcacatttcgttttgacctccctctttctcccttttcataccatctattctctactgtctccacatccggattttaccttccacctcctagcaccccaaaatcccctttctcttctcattcccttttcgcactatctgtg

SEQ ID NO: 4636 - DNA, 759 bp, Photorhabdus luminescens
aagctttaatatatctacaaatagttgagaattcatcttattaccttattttagtgaaggcttctggatacatttctttatttaaattgtgcaaatcttttattgctgaaggaggagcattagtataattgcgcaagtctctaatatcttttgccaataaatctctagccgatcccgtataaggtcctttcattgtaggaatcagtttatgttctcctctagggagagctattgatggagctactttaggatcataaccagtaattacttgccccgcaggatgtttttgagccgtatggtggatatctaatttatcacccaccttagaacgtctctgtaaatcatcgaatgtactaacttcatatttttgtgttggacaagctgccaacccgaacgggtctatccaattgaccggatcatggacatacccgtacgggttaacgccaccactaagattcagaggatcaggcgataagtactggcccgtatcactctcgtaataacggtgccgattataaaataaaccgctttccctgtcttcatactgaccaccagaccggaaataccactcatgctgcgcgggtcatttgaccgtcagcaccggccagcattccggctcgccccagcgatcattctccctgcccatatcatcctccccgcttccgttacgatttgccttgccgcgccttgatgatcactcaccacttattccggtggcccttttgaaaccggtcacaggcgtcaggtccccgcctattc

SEQ ID NO: 4637 - DNA, 652 bp, Photorhabdus luminescens
  misc_feature (196)..(196): n is a, c, g, or t
cggcattgtttagggcgtcatccgtttgcaaagatagcgctgttttctcattgccttgcaccaaaatgtcgattgttgtgatgcgtgttgccagtgtcttgatataactgacaaatgcctgttgctcgcttttgtcgaggcgactgatgccgaccggtctgtcattactgtagcgccaataagcgttgctctccancgcacgttccagcattttctgttgctggaacaattcgggactccactcgcgaccattttcacggaaccccttcttgatctcttggaccagcgcttgtatttccggctcgctcctcatgtctctaaaggcctcttgtgcagactcgagccgtgattgatacccgctactcggaataatggtcctccttatgacaatcctactttgatatttaccgattacaacgcttcaataatgggtggctctggcggacacggctagccgtctgtgatcttataatctttcatttgtcacgtccatagtccgtcataaagctccgtttaacgcccataactgcttctgacttccctttccaccacctgacctaggtctaaaacgagtatcttattggcttgccccatcgtattactgcaatggcccaccttgatcctaccctgcccttttcatccccgtacttca

SEQ ID NO: 4638 - DNA, 758 bp, Photorhabdus luminescens
tgcattaatccagcaaccgccggtgattgctgaaattgcttaagttgaggatcttgtaattggatagctttacgcacattttcataagcatcgtgataaggtattgtgccggaaggacggaaagtggataacattgccatcactttagtatcgttgtccagattaggctgattagctttaactccttccaacaaaatttcattagacagagaaagagtggaaagctcggtatccatattttgctgattgagcgtcattgattggaggtctgggcggcgttgatccagatgataaacggagtcactggcatgtaaattacgtgcttcacgatagagttcagttaaataagccgcgggggagaacatagaggaaaccgaacccggtgccacatattggctggctcggccaccaaattcattattatagccttgcaattcagcatgagggagggtaattccgaggtgtactgcattttgcaattgtgggttagcgcgtttgagaatactcgcttcatataatcgattctcttcttgttcctgttgtgcatcacgatataagcggctggtctctgaccaggagagatgatcagaaacttgctgacggaatccattaatagaatagtgacatatatccgggcagacaatgaataccacattggctccgtaatacatcaggtatttacttgacctctgatgacatgtccatttctcccaatcactaggtaataaaacattcgtgtgattctgcaccatggttcc

SEQ ID NO: 4639 - DNA, 697 bp, Photorhabdus luminescens
  misc_feature (316)..(316): n is a, c, g, or t
ttgagtctgaacataatcccgttcaattattctcatctcactaatggtgaccgtccaaacggtcaccaaactcgataagaaatagatgcctcttagccacaaaaacatcgcctagatcacactttagtcacaaatcaccatttcccaacgaaaagtaccagcgaaccttccaaaaatctattcaagaaaagccgttctgaggattcaattaagaaacacaaaacaaacactaaattaacatttccgtgccaatattgattatattatatcaagacaggcgctttttatgacgactgtgaggtagatatgaaaccanaagattttcgcgccgacaaaaaacgtcctttcaccggtgaagagtacttgaaaagccttcaggatggcccgcgaaatttacatttatggcgaacgcgtaaaagatgtcactacacatcccgattccgcaattctgctgcttaattggtcagttgtacgatgccctgcacgccccgggaaacccatgataccctgggcctgaatacccgaacccgggagtggcggggatacttccaaattcttccgtttagctaccatgcggatgatctgcgcccacaacgtgatgcgattgctcgagtggtcactctaaccctatggctgcatgggcccgcaccccccctatgaagccgggcctttccgtactccctcgccactttgtctt

SEQ ID NO: 4640 - DNA, 761 bp, Photorhabdus luminescens
  misc_feature (11)..(11): n is a, c, g, or t
  misc_feature (69)..(69): n is a, c, g, or t
  misc_feature (170)..(170): n is a, c, g, or t
  misc_feature (304)..(304): n is a, c, g, or t
  misc_feature (384)..(384): n is a, c, g, or t
  misc_feature (534)..(534): n is a, c, g, or t
aagcttccgtnctgttattcctgtccggcgttatccgggaggttatttacgctatcgtcaatagcccangcatcggtctggttgaagaacctctgatgaacaccactcacgccattctgatcattatgttgagtgtcgcaactatcacaacgatgttctgttcagttganactgacgccattctgaactccagtacctttaaagcgggtatgagcgcatgtatctgtattctaggtgttgcatggctaggagatacttttgttcaggcaaacatggattggattaaaggcaccgctggagactnaatccactctcaaccttggttgctagcgatcattttcttcttctgttccgccctgctctattctcaggcagccaccgcanaagcgttgatgccgatggctttggctcttaacgtcacaccattgaccgccattgcctctatctcagcggctcttgggttgtttattctgcctacctatcccaccttggttgccgcagttgagatggatgacaccggccccacccgtatcngccgttttgtatttaatcatccattctttatccctggcacctccgggttgctctagctgtggccttcgggtgctattcagcaagatgatcctgcattctggctggcactaaccacttacccaggggcgtataccgaccctgattcgccccttgccaaccactcttttgcactgtaaaccctggacacctgtggcaatgtaaccccaacccttctgcgctgccggctc

SEQ ID NO: 4641 - DNA, 764 bp, Photorhabdus luminescens
  misc_feature (644)..(644): n is a, c, g, or t
aagcttttcagacggagaggccactatgcccatcagcaaggttgtaaaacgcgccgccagccgctttattgtctcctctgcaaacaaatccgtgttgtactcgaaactaaaaatcagaccttcctctgtctgctgggcctctaacgtcaattcatacatcgcattgcgggtctgttccggccgtggccgcaaacttatcccttccagttgcaactccacgctgtcattcgtattcatagaaaacatgatttggaataacggtgaataacgggtgctgcgttccggctgcaaccgctccaccaacaactcaaacgggacattttgatgccgctgggcagccagatttatctcccgaaccgagctcaagtaatcaataaacgattgctccagcccacactcgctgcgcaacaccagcgtattcatgaaacagcctatcaacggcgttaatgatatctgcaaacggttagctaccggggttcccaccacaatatctcgttgcccgctatgacgactgagtaacaccgtaaacgccgcatgtaacaccataaaaagagtacagccctgcgtcagtgccagttgctgcaacctcttactaacctcattgttcagactaaattcataactgcggccatgactggtttggntagctgggcgccccgtaatcaaaggcaagccgtgtaccgggggtaatccgacaactgttgctgcaataggctaaccctgccgctacctgagcctgtctctctgggctactctggcagaca

SEQ ID NO: 4642 - DNA, 762 bp, Photorhabdus luminescens
aagcttagaataaagcccaagagcacagctactcttgggctttttaagtttcaatccttccttatattatattggcacgctgccatgtcgcttcagagaacaggaccatcccgtccccatcggagttatgtgagagcatgacatcgataaaataaatggtttgaggagtggttaacatggtttcacaataggttgcgtcaaatgttgtccaacgctcacgaattacctgtgttgtcgcatatgcgtcagggacaacctggacattagcagcagtaaacaaagacaaattacgcgacgatgcagcaagcaaggtctgttttgtattattcgtcgcacttctcatatcgatatatgatcgaatcatcgacaacataccattacaaagataaaacacagaaatattgatcttctgccgatgaggattttgcatcaatgctcgttcaatatgggactcaatgtttgggattaaatctctggcaccatcaccaataaatgcccgaatattctgggatgatgtacgagccaaattaggcagtgacatcaacgcatcgcccatcagtgcccggccataccaaccggaaaatcctttccctgttctcgggaaattccgcatcggcccgattcccaccttcctacatcataaacaccggtgtagacaaatgcctgctcactaatcagatgatgcaactgcttgcctaatgtggataaaagtaattggggacttcgtacctgtggcaccacttatcgggtgatgtaggaaat

SEQ ID NO: 4643 - DNA, 767 bp, Photorhabdus luminescens
aagcttgtgcaaaggcttatgactcatcgttgcatgaagcaccgattgtgattgggcatccaaaagacaatttgcccgcctatggttgggttaaatcgctgacatcttccggtgatgacttgattgcggagcctcaacaggttgatgttcagttcgctgaattggtcgatgcaggccgctataaaaaaatttctgcttctttctatttacctgattccccaaacaaccctaaacccggcgtgctctatttgcgtcatgtcggctttttgggggcgaagccacccgccattaaaggattgagacaggttgaattcagtgaacaagaatatggtgtcgtcgagttctctgattggagtgatatcaccaacgcttcactttgggggcgtttgcgagaatttttgattagtaaattcggcatggacgaagcagacaaagcgcttccttcttggcaggtagattcattacgtgaagaagcttatagcacgactcagcctgctcctgcctttcatgaacccataacacacatcaacttgaggaacacatcgtgacatatgacaaaaaaaaggcgctcaagatgaaaacactccctgaaaaaacagcttactcgccgtgatgctggccgacccaagcgccaacaaactgagcatcatgccggaaacgttgccttttgcccaacagctgatcacacaccggaaatcggcgccagctgtttcatgcatcgtgaccgccttgctggacgctgcaaccccaggagaatcccttgttcg

SEQ ID NO: 4644 - DNA, 772 bp, Photorhabdus luminescens
aagcttggacttcaagagcgtcagctgattgaacgactcatccatgagcaggggaatggttttttgaatgtctaattctcgtcttgaggcagcagaatatcgcccagcctgtgaactgatgtgtgaatatgtccagcgtcataaatatcgtgctttccttcaggaaaaggttgatatcgcacgccaatctgtaaaagagggtaatggtgttgaacatagcgacgtaaaagcgatttttgcggctcgaagagaacagtttaaggctcgtaagtgaacgtaatttggacacctcaggtgccatcgactggtttatgagaactgtctggattttagctttagtgcatacatcacgattgtggccgtaggaagttgagtaattacatgcttattaagaaattaattgccacattggaaggtgaaatacagatattaataaccacattgcttaatgagcaatgggaagccgctagggaattaatgaatgaatcattgcgtatggcggctgatgatttagctttaactgcattggcagacaggttgcgcacctcagatatcgatattacttatcagccgcagggtgcttggcatctgccgctaaatactctcaacggaaagtcaatctttatatcgggattaaagaatcggcaatcaattctttctcgctattcccatgcccaatacccgatgcgtctgccaacatcgcctctctatccaaaaatctccaaaaccgctggtcttaaacatttcccgatggctcggtctgtacgccttc

SEQ ID NO: 4645 - DNA, 768 bp, Photorhabdus luminescens
aagcttggggtattacaccgcaagcaatgattggtcatagcctcggtgaactggttgcggcctgtgtagggggtatgcttgaactggaagatacactggcattggtagcaaatcgagcggcaatcatgcagcgccagcccacaggagcaatgctggcggtacaggcatcatctgaacgtatggttgcgctggcaccggagtgtgaatttgcagcactcaacgggcccgcacagtgcgtgataactggcagccatgacaatattgcggtactggaagaacaatgcaacaaggcaggtatttcttgccagcgactaacgacatcacatgcatttcatagttcattgatggatgctgccgcacaacagatgcgggaattcagcgcaggcttcacgctacaatccagtaccattccgatgatatccaatatcagtggccgttggttcagtgaacaagatcgcgataattctggttattggggagatcttctgcgtcggccagtacgcctttatgacggcattcttacgttactgaaccattatgaccatccgatcctgcttgaattcgtccaaggcgtgcactgaccagtatgcttaaagatctacagcaaacaagccaagcccagatactaacccacgatgcggcatacctcgccaggaaaacccggatgatgacgtgctgctaatacccgtgcggctttattgcaaccaggacttgcttatcattgggctgcatttggtcttgatacaattacatgtggtatgctgtcgg

SEQ ID NO: 4646 - DNA, 770 bp, Photorhabdus luminescens
aagcttgctgttccagcatgtttttagctaaatcgacaataattgccgcggcttcgattgggggcgtgccgccacgatgaatattagaaatacaagtgcggtcagcttcaaccgttttttctacagttggttggtaaacagcatagcaggaaagactttccgattgccctaatccggggcgttctccaatcaataagacaactaccttagctttgagtaactcgccaatttgatcttcgattttaacgcgaccatagcgtacaaaaaacggcgtaccgatgcacattcctgcttgttccaacccttttaacagaggtggcacaagatcttcgtagttggtggtaatggcatcagtagacaggccatcggagataacaacttgtacatcgggcgctgttttacactgtgtcagtaaagtttctaccgcattcgcactgagttttcgccctaaatccgggcgagtcagatagagatttttgtcgctgacttgagattgcacttctagcattccttgttctctatccattcagccgggacctcttttaacatcgtatctttagaacgggagtgatcagcctgaacacgcagtaatgcctgactacgtgggcgtggatcacttgcgtccggaccgactctcgctaccgtgctgcggcgtaattcctgttagattcctatccgctcgggttttgacaccgattcactgcttggcttgtattgagccttaatcccggttacatcttcaatccgctccctgattccacgggatgctg

SEQ ID NO: 4647 - DNA, 759 bp, Photorhabdus luminescens
aagctttttaattagggcaagatcgctaatgtttttttaatcacgaatatatccgtcatctttcaagttgcctctttgttggctgcactcgctcatcccggtcacatcgttatctatgctcccggggattcactcccttgccgtcgcgatgcatcttgaaatctttagggtataaagaatagatcaattaatttggaggaatagcgctaaaaacttttctcagtggtcaaattgagtgaaatacagacaatgtaactcctgacaaggtaatgccgtcatgatgactcgttctgttttgaaaaaagacaggtcagcgatcgaccaccatcgtcgaaaaatagatgaactagatgcgtgcgcaatacgggttatgactgtagtactaggaaaacctttccttccttaaatcatatttttgtaaaattaatgtaaataatttgtgattataaacacaaaaataagataaatatgattccttgataattggagagaaataatattaacaaattgattcctacgaaaataaaaacaataaactgatccatttgccattttggctaatggttcgatctattgaatatacatgtatatacaactatacatttacgcaatatctaaagatcaaaaggagccagaccgtgaccgcccaaatagtaaattccgtagcgtcgcgatccggcacccacaggacacaactaccactcaaaggtggctaccgaagctctctgcccatgtaatgaatatcttgatccaaagttg

SEQ ID NO: 4648 - DNA, 677 bp, Photorhabdus luminescens
  misc_feature (511)..(511): n is a, c, g, or t
  misc_feature (535)..(535): n is a, c, g, or t
tgcggatgttacaaaaacaggcccaccagttgcgctggcaggccccggtctacctgtggcaggtgtgtcacagtacctggtctcaggaaggtcgtatcactcagaccgtcggctgcttttttcctgaacgctgtaccccggatatcgtggcgacacagttacaaacgttggttgacccgttgcgcgagcgcgggatgcagcaactgttggagaagacggcccacgattttctttgtcgtctgtccgcgaacttgaaacaacaggggattgcgcactggcaacaggtcctgacgccgtggttagcggagtatggtgatgtggtgtcgctgcggggtttgatgttcagtttgccgcttaaagcgcagacgactcgcctcccgcagatctggctgcccgacacggcatggcagggggtgttggagggcagtcgctgtttccacggtcggcgggtgggcatgctccacacacagaccgtttgtcgtggcctgatagtgctgggcttgttatgggngggccggaatgatgctcttctttnttacccaccctgaccagctagctgtggtgcaggcggcggtcactgacctgaaagctcagccggagaattttgatgcccatttgatggccttaaagcgctgcgaaacgaggtggaccggctgcaagaccgggctgaacacggg

SEQ ID NO: 4649 - DNA, 821 bp, Photorhabdus luminescens
  misc_feature (6)..(6): n is a, c, g, or t
  misc_feature (14)..(15): n is a, c, g, or t
  misc_feature (20)..(20): n is a, c, g, or t
  misc_feature (693)..(693): n is a, c, g, or t
  misc_feature (766)..(766): n is a, c, g, or t
tcgaanactaactnntctangctctcggctggtatactgtgcggaattgtgagcggataacaatttcacacaggaaacagctatgaccatgattacgccaagctatttaggtgacactatagaatactcaagcttcttccgcatccagagattttttatctgcttcaataacggggaacagagacaatacaggaatccccagccgggcaatctcttcagcttctttcagcaacagatccatcgtcagacgatacactcctggcatagagggcacttcttgacgacgattaatgccctccatcacaaatacaggatagattaaatcattaacagttaattggttttcagcaaccagacggcgggaaaaatcatggcagcgcaaccggcgcatacgtcgaccagggaaagttcctggaaatgcatagctcatatagctctcctaacgcaaacccagcgcactcgcgctgggttaattaatatgctatcgcttcgtgctaattatcttagcactacagaacagcatgttaagattactattatcacttttccgtattcacttctggcgcttcctgctcatcttcctctgaacgatccccccaatttccgctgcccggtataaaaacgggagagcaaaatccccagttcaaacagcatatacataggaatcgccagctaggtttgcgagaaaacctncggcggcgttaacaacatgccaacaacaaagggccccgacaaaatatacgggacgcttttcttcaaagattcnggtgaacctacccactccaacatactaaataatgggaacgggtcctcaaaagaca

SEQ ID NO: 4650 - DNA, 674 bp, Photorhabdus luminescens
  misc_feature (657)..(657): n is a, c, g, or t
gtgcgataccataacgaaagaattgattcacaaacttaactaagactactgcatgattaatacagaaaccttcgacacccacacgcccatgatgcagcaatatctccgtcttaaagcacagcatcctgatatcctgctgttttacagaatgggggatttctatgagctattttatgacgatgccaaaaaggctgcaaaattgctggatatttccctgaccaaacgaggtcaatccgctggcaatcctatccctatggcaggcgtgccacatcatgcagtagaaaactatttagctaagctggttcaattaggtgaatcagtcgctatctgtgagcaaattggcgatcctgccaccagcaaaggcccggttgaacgtaaagtcgttcgcatcgttactcccggtaccgtgacagatgaagcgctattacaggaacggcaagataatctgctggcggctatttggcacgataatcaaggctttggttatgccacactggatgtgacatctggccgcttccaatatctgaatgatagagctggaacgatagccgctgaattgcacgtaaccgtcctgttgattactctatcctgaaagtttgagcatatggcgctaattgaaattttcatggcctgcgccgtcgccctttatgggaattngagctagataccgcaaa

SEQ ID NO: 4651 - DNA, 698 bp, Photorhabdus luminescens
  misc_feature (491)..(491): n is a, c, g, or t
aagtccggcttgtcgtaccccatacccaatgcagtagttgccaccagcaccttaagttgattggttagcaataactcttcaagatattgtcggtaatcgttactgttttcaaaaccatcagcctcaatactgctatggtaggctctggcatttatgccattgacgttcaaccaatttgctacctgttcggcatcacgcactgttaaggtgtacacaatgccagtaccatgcaatgtgggaatcacttgcgccaaccaagctaggcgagaggattgatcaggcagcaccatagtttgtagcgagaggctttcacggatcagtggaccacgctggatctggatattacccagttgtgtttggatatcagccaccacgcggttattggcagtggccgttgtgcctaataccggtgtattaggtggcaactggcgcaaatattgactatacgccgatagtctgggcggaaggcattgccccagtccgagatgcantgggcttcctccatcaccctcagagcactacggtcagcgataggatgaaacacggttttcatgaagttattaatcggcgagccgttaatgagaaatcaacaggcaatctattctgattatttatattcctttgtgtcaccggctgccaatccgcttgatgggtgggaattatagtctcggctatagagccaagccgctggcggacta

SEQ ID NO: 4652 - DNA, 699 bp, Photorhabdus luminescens
  misc_feature (336)..(336): n is a, c, g, or t
tagtgaagacgggaaagatgttctggtattaagcccagaagctgatttcttccgctatatgaaagcacctgaaaagcgtgcaggtcagcactaatagatgctgaatctattgattaggcccgcatcaggcgggccttgtcatgtctggtggctaacaaaaataacggatgtgataaaaattactgaaaggtgtgggatgagatgttagaatccatttttaagcaaccgagtgaattttgaaatgggtaagaacgttgtcgtattgggcacccaatggggtgacgagggcaagggcaagatcgtcgacttgctgactgaacgagctaagtatgttgntcgttatcaagggggccataatgctggtcatacactgggtatcaacggtgaaaaaaccgttctccattaatcccatcagggatcctgcgtgaaaacgttattaatattattgcaaatggcgtcgtattaacccctgatgctctgatgaaagagatgaccgcattagaatcccgtggtattcctgttcgcgagccgctgctcattaaagaaccttggccactattcttccaaccatgttgcattaaataatgaccgcgagaaagcgcctggcgcaaaagcaattggtacaaccggttcgcggttttggcccctgcgtttaaagataaacgttcctcgatgcggtcttcctgtcggtaatttatt

SEQ ID NO: 4653 - DNA, 689 bp, Photorhabdus luminescens
  misc_feature (122)..(122): n is a, c, g, or t
acggatagcatgattaattaaacgatcacgcatcatacgcccgtttacataacaatattgaatatcaccgctcgcctcagtattcatcgggtcaacaacccatcctttaatcgataaatcgncgtgctgccaggaaagagaaagtgcccgttgcataaaagcggtaccacaaatggagaccaaccgccgctcatactgtgattcatcttttgccggccggtattggcgcaccaatttaccgttatggtgcaaattgattaatacatccaaacgcgccaacgcaatgcgtctaacgacttcatcaatatgaccaaattccgtttctcctgtccgcagaaatttgcgccgtgcaggagtattataaaagagattcaatcactccaccagtcctgcctacttggatgcgctgccggcttcacggtcactgccatatttcgccctttcgcgtgagcttgccacccttttcgctgttcttcggtcgggaagctaattgcaaacctgaacttgaactgatgctcgccgggtcctttccacggaatcccatcctgattatggcttgcaatcttcaaggggtacacattttactgctgcatgacagccgacgctagcgcacgctattatgggtatgcaccggcttatcacggaacgaatcatttgtcctcccctggctatttcacgtccatacggtt

SEQ ID NO: 4654 - DNA, 681 bp, Photorhabdus luminescens
actatcaggaactttgtctggccgccaatcgtcgggtaatccgtccctgttgtaacacgttgcatgtcagcctgttttttgatggcaccggcaataatttatataacgacctttatcaggctgttcctaaccatccgaccaatgttgtccgtcttttccaggcaaccattggggcgggttatgccggtagggcatcaggtaagccgttactggataatattgagagcactcgaatacagtactctaactcttatattcccggggtgggaacccctttcccggaaattaatgagctggattacagcaaattggggctggccgtctctagcggcccagaagaccgtcccatcgtgctttctcgccgttgattgatgtatacaaccgcgtactgtcaaactacataatcgctgatgcttcccgcatcaatccctgcaagccattgtatccacctggcatatctcgcagtttgcaggcatcatcccccgtctgatgcacttaatacgttttttctaccctcctccccgattgataatcgtcctaagcatccttatcagcgactcgccatcccaggctctaatacccatccatgctttacccctcccccccttcactatccatcgtaactaccgatcgatcccatcttctgcatataaccaccaatccgtttctcgccacacttaa

SEQ ID NO: 4655 - DNA, 697 bp, Photorhabdus luminescens
  misc_feature (123)..(123): n is a, c, g, or t
  misc_feature (157)..(157): n is a, c, g, or t
  misc_feature (211)..(211): n is a, c, g, or t
  misc_feature (232)..(232): n is a, c, g, or t
aatgtgatcaaattagaacaaaactatcgttcctctggctgtattctgaaagcagctaatattttgatcgccaataaccctcacgtgtttgaaaaacggcttttttctgaactggggtatggngatccattgaaagtgattacagctaataatgaanagcatgaggcggaaagggttattggggagctgatggcacatcactttatcaatnagacccaatataaagattacnctattctctaccgaggaaatcatcaatcccgcgtgtatgaaaagatgctgatgcaaaacccgattccttaccggatttctggtggtacttctttctttgcccgtccctaaattaaggacttgctaacttatgtgacggtgctgactaatcccgaatatgacagcccattcctaaaaattgtccataccccaagacgtggaattggtagcttcctaccattccaataacggagtgagcgggccaatgaccagcagtaaaattctctattacgctatttatgaccgcaggtcgccaacatttatacctggccacgaattgttttctctacagcgccctttaccccgcgtgacttaatatacccttcagaacggcgatccgctttcttccggatagcaatccccattatcgagtctgcacggactctcccgatgtcacttaccttcggcgttaccccctaatactaca

SEQ ID NO: 4656 - DNA, 681 bp, Photorhabdus luminescens
  misc_feature (201)..(201): n is a, c, g, or t
ataacgaattttttcgtgggcttgatattcgatctgctttaataaccgggtgatatcttggttaacaccgagtgtgttgagtgtcagcagtggggcgtctttctctacccgctgcccattctgaacatggatagcggtcacccggctctgttcgtatgcctgaattatctgagaacggccagagacaatcaggcgaccggntgcggttgcctgaacatccaacttacccagataggcccagagcaaggccatgataatgccgatactgagcgtgattgcagtgtagcgggcaaaaggtgacggtggtcgttgtgacaatgctaaatgtgtcggtaaaaagtcatagcgctgcggacaagggcgcaaccaggttttaatcttattcttatacgctttaatcatgacaaggcatctcctgttttattttttgttgtaactgccaaatcttccggtactgtctaccgtggataagtacctgttcatgagagccttgttcgacaattttcccctgtttaagatcactgatgcgatcacaatgacgtccacgtgaaatgccgcgtgccatggtgataaccgatctgccctggtcacttactgccctcttttattgatcgctcgattgtgatttgccacaagcgcactgtttggtcattcataatcaggattctgggtcacctatga

SEQ ID NO: 4657 - DNA, 756 bp, Photorhabdus luminescens
  misc_feature (476)..(476): n is a, c, g, or t
  misc_feature (489)..(489): n is a, c, g, or t
  misc_feature (509)..(509): n is a, c, g, or t
  misc_feature (652)..(652): n is a, c, g, or t
ctttttgcgacacgggtctattacaccagccataatttcattactaaaatattcataatgaattttaatatcttatccctcttaactaccgggaaactcacactacctcttacagaatatttatctgccgaaatttgatcttaaaaaatcgtttttaaacgtttttattaatatcaaaaatcatttttttgttaactgagtcgcgtttttgatatcaacttggtaatattttaaaaacattcttgcaacaccaactgttatcagacctatacttcacaactggtctgatttgtcatcaagacaaaccgatcctacaatcctgcgctccttgctaagataagtggcatagttaaataataaacaagagggttttggttatgaaccagaaaaacctgttcacccgttcagcattagcggttgcagtggcaataatttcatcgaatgctggcgctgctggtttccagttaaatgaattntctacttcggctntgggccgcgctttttccggngaaggcgttgttgctgataacgcagcggtaggaagccgtaacccagcagcaatgacactgtttgatcgcccatcattctctattggcgccgtctatatcaacccagatgttgatattaccggtaaatccccagtaacaggcanaagtactaacgctaaaaatattgctcctaccgcttggatacctaacatacatttcattatgccaatcgatgatcaatggtttgttggtccctcggtcaccaccc

SEQ ID NO: 4658 - DNA, 767 bp, Photorhabdus luminescens
  misc_feature (614)..(614): n is a, c, g, or t
aagcttataagcgtgacgaccaccgcacccaccctccgaggtaatcttcctctgattgaattgatggtgagcacggtcaggcagcccggagcaaaaccccatcccaaaatataccaaataatcattaaccccttcagcgggatgctatgtgccatttctaatatatcagcgcgccataatataagattcaggcatgcagccaacacagccagaaatacggaaacggcaaagctattgggcaaagttaatttcttattcactaaaagaccttgagacgagcaagaaatctcgcaccagttactgagttaagaagaaagctgcccaaaatgccagcgataagtgcggcagtatatcctttaatcaggaatagcaacggcatttctattgaaccccaataattcagccccacgttgtggtccaagccccaacaaagtgtttggcaaacactgaataacagagtgctacttactgcggtcatgatataagcgccggtacttccaggcgtgaaacgtgctgataccaagtaagtcaaccccccaccgcggcccccatgccaataccacattaaccaagcgcccatacgagacgccataccaaagggccattatcggganacaaataagccccattaaaagaatgcagactctgcgataaagcccacagaaataaataccctgaatcgtgccgatagcttcgttgctaaccttctgcaccacacattgcggatctggggattccagatgcaagtagacatgtgaatgtgctga

SEQ ID NO: 4659 - DNA, 674 bp, Photorhabdus luminescens
aacactctgcgctccaccgccggtgacgcggggcaaatggaaagtcccggcttgcttaatcccccgaaagcaagctaatccatttgaaataacaagggattttggtttaagatacactttagcccaacgggtaagttcctcggtcttaaaccctttcacaacgctgaaacgcatgaacatagggtggcccttttcattcattgaaacctccgcaacgaaagggcatttcccttttgcccctcgccctcggggccatgctgagcccctccccagtatgcgtcgtcaagctgaataaacccgccgagaggcttttcgtcatcccgttctttcattgctttcattagctcgtgtttcatacgccatgccacgttgtacgaaatgcccacttgacctgaacaattaagtgcatatatcccatttttctcctaagtcatgagataaatcgccaaaaaccacacagttaaaggtaattttgacccagaaaacattgtgcctgccgccacagatgcctgatgatggcattaatcgcactgataaaggaaactagattttacctggcatactaatctgcccacatggaggccgcggaaccccgtacgccattgcatatccaacccctgttgctgcctcggacttcacgatcttatatgaatacctgataatgcaatcctttt

SEQ ID NO: 4660 - DNA, 765 bp, Photorhabdus luminescens
  misc_feature (582)..(582): n is a, c, g, or t
aagcttcaaacacaaaggattggaaaaatttttcaaaactggttctaccgctggcattcagcctaagcatgccctaaagctgcaaatccagctaactgcattgaatacggctaaaaaaccagaagatatgaatgcccctagctggaaacttcacccactaaaaggagcaaatcttagcggtcactgggcaatatctgttaacagtaattggcgtttaacatttagatttgagggcgaagatataattctcgttaattatcaagattatcactgagggcaacgaaatgaaaatgcataaacctgcacacccaggcatagttttgcgtgaatatcttggtgacatatctgtcacggaagcagcaaaggctctcggtataaccagagctgcactatcccgcatattaaacggcaatgcaggaatatctgctgatatggccctgcgactggaagccgcattaggtactagtgccgaaatgtggacaggaatgcagtcccaatatgaactgtggattgcctcacagcacaaaagaccagaaataaaaccaatactggctcactcctgatagcgtaataagagggctntacttagccagctaccaacactacacaccatgcctaataaaaacggcaacccgaaagttgccgttgtaaatacgacataactactcttctaccaaaaccacatggccgatataaggcagatgacggccaagttgcgcatattcataccatacccaccacacattatcctaattgagtacccat

SEQ ID NO: 4661 - DNA, 690 bp, Photorhabdus luminescens
  misc_feature (314)..(314): n is a, c, g, or t
accgtgaattggtacgtgatcactttgccattctgaaagtcggtccggctttgacttttgctttacgtgaggcgctgttcgcactcgataaaatcgatggtgaatggaatggggaacagggcgcggctcatctgcgtgccacgctggaacaggtcatgcttgagcagccggagcactggaatcgctattaccacggtacaccacatcaacagtttattgatcgtcaatacagtctgagtgatcgcattcgttactactggccgcatccgcaggtacaacaggcagtgaataccttgatggataacctgcgtggncccccggtttccctttcactgctgagtcaatacctgccggagcaggcgcaggcggttaatgccggaaggttggataatgacccacactcatgggtgttggataagattcgttctgtgctcttgagctatgcgctggcttgtgagcccgaggtacaaggagttttactatgaatgaactgtttttcctataccgaagctcggttgcttgagcctcatgctctgtatactgtccgagagattcataacagcctgagctctgactcagctatctcaaaatgtggaacgtcgaggacgcttattcgcacccttttttgctgtcttgtcctccgatccacattactcctaccaatagcgctttgctgcgccggatctatca

SEQ ID NO: 4662 - DNA, 788 bp, Photorhabdus luminescens
  misc_feature (752)..(752): n is a, c, g, or t
aagcttctgcgcaacctttctattggggcattatcccagcaattgccacggtggttcatactttgctttgcgtcatacgataacaccaccgcctttgccggaatgaacagctggtatactgactaccttggtctgaatgaaacatcaccttttacggtctgtcgcgttgttcgtatgccatgtcccgtgctttaaccactaaatccgcatcgggctttgctgataatgcccagccagcaacatgacgacagtataaatccagtaccacagccagataataccagccgccttctgcctaaatatagataatatccccgcaccagacactatctggcgcgctaacgtagatgattcgggatatccaatcgttcaatccgggctgttttataactgtgtgggcttggctgcttgctgactatcccggcctctttcatcaggcttctgaccttgaaacgccccatttggtaccccagagtacgcatcatgcccagtaaagttctgctgtccgctgaagaaacgtacgacagtgtcttgtcattgaatacctcttttaacgtggtaatctttccacctaaatgggtcttccggtttattagaccgctacagtaatttatgtaaaaaacaaaatggtgatattttattaaaaactgctttataattatcctattaaatagctgttaattcaagataaacaagcccggggttaccctacgcttaggtaaacgtaaacgcacgatatcttataattgatnacaactcagaggcctatctcaatagggctgtaattg

SEQ ID NO: 4663 - DNA, 767 bp, Photorhabdus luminescens
  misc_feature (174)..(174): n is a, c, g, or t
  misc_feature (608)..(609): n is a, c, g, or t
aagcttggtatgagatggaagagctagcagtaatggggattgtcgaagttctcggacgtttgcctcgtttgttgaaaatacgtaaggatctgacaacccgtttcacggaactaaagcctgatgtgtttgtgggcatcgatgcgccggatttcaatattacattagaaggtcggntaaaacagcgaggcatccgcaccattcattatgttagtccgtcggtatgggcttggcgtcagaaacgcgttttcaaaattggtaaagccacagatatggttctggctttcttaccttttgaaaaagcgttttacgataaatttaatgttccgtgccggtttattggacataccatggcggatgctatgccattgcaacccaataaagcgacggcacgtgagctattaggtattctgccagagtctgtttgcttggctttattgccggggagtcgccattctgaggttgagatgctgagtgcggattttcttaaaactgctcagttattgaagcgaaacatacctgatctgcatgtatttgtgccgttggtgaatgctaaacggcgtgaacaatttgagcgcattaagcaagaagttgcgccagagctgaatgtnnatcttgtcgatggcaaagcgagagaaattatgatcgcaagtgatgcccgacttttggcctctgggactgctgctctggaatgtatgctggcaaagtgtccaatggtagttggttatcggatgaagccattgactttttggctggcaaaacgcctggta

SEQ ID NO: 4664 - DNA, 784 bp, Photorhabdus luminescens
aagcttttagttccggggataaattctgcaaccccgcttcttcttgaacttttttcaggctttcctggagctcctgcaatttcagctcttggaccaactcattttggacgttagcagctaaagagcgcagtgccctgatccaaccagcaaccgtttttacagccaccggtagccgctctggccccaaaaccaccaagccaatgaccataaccagcagcaactcaccaaaaccaatgtcaaacacggtttatacctgctctttgtttttgctctcagatgtttcagattgagctacagattgtttttcagtaatgtttttagtctcaaaatcggcatcactactggttttttgagcctgttgaggctgattatcatcccctatcgcctttttaaaacctttaatagatgccccaagatcagaacctaaagtacggagtttattcgtgccgaacaacagcaccacaatgaccgcaatgatgagtaactgccaaatgcttataccgcccattctgatttacctctatttaacaggaattatttttttagggtatatacccgtcatctttcaagttgcttctttgttggctgcactcactcaccccggtcacatcgttatctatgctcccggggattcgctccccttgccgccgcgatccatcttgaaaatcctagggtatatatacacgacgaactataaccgaccttcaaagaaaatgtaccctaagacaaactttactaaattttacacagccgacaccagcccaacaacccatgaaccggtccc

SEQ ID NO: 4665 - DNA, 783 bp, Photorhabdus luminescens
aagcttgcagtgcactcaagtctaaccggccaaacaataatggatttctgacattgcctcccagacgcaggttagcattcaaatgaccttcagctttatcacctttcccaagaatcggcttgattaacgccagtgaaatatcctgaatatctacattacccgacagcttacggctcccagcaagatcagcaacttgtacgccaccgttgaatcggccatttcccataatcttaaataaccaattcaactctgctgtgccattcttcaagcctgcattgagtgtcagggtctggaaatctaccggtaatgcagtgccatcaaccatctgcttaacatgcaccccatcaccacgcaaattaacgttggcctgaggcaatccgctttccgcactccatttaacgtcggcattgccactgaatatacctttcaaatgtgtttcaggtgccagtaatggctgaatcaaagcaagatccaaacgttcaagaacgatggatgcactaccgctgacaccagcttcaatggatttaggtacgcagaactgcgcatgtggatttagccaacagtgagggcccacagtaactttctgctgctgattaagataatcaagagttatcgctttagttaagcgccattctccaaccggggtgtcaaaacgggtattgttaatgctacctttccatcgctgttgcttacgatcaaaactaccatgcaatgcatgttgacccgcaatcgggtttgccgtcatcttcaattgcaagtcgtgctgtttctcattgcccttag

SEQ ID NO: 4666 - DNA, 784 bp, Photorhabdus luminescens
aagcttgctggatgaatactaagaataaaaaattattgcagacgatggaaagccgcctactgcctcacattgagatttacgatttggcttctttgacagcattgatataatcaagaaattattctgtataaaaacacagcaacctctgggtgctgtctaatcaattgatggtaactatggacgtctcctatctgctcgaaagtctgaatgacaaacaacgggaagctgtagctgctccgcggactaatatgttggtattagctggcgcggggagtggtaaaacccgggttctagtacaccgaattgcttggttgctatcggtggagaaggcttcgccattttctgttatggctgtgaccttcaccaataaagcggctgcggagatgcgtcatcggattgaaaacttgatcggtaccagtcaaggtggaatgtggattggtacgtttcacggcttggctcattcgttattacgagcccatcatctggatgctaatttgccacaggattttcagattcttgacagggaagatcaaaatcgcctgcttaacgcattatcaaagcgatgaatctggatgataaacaatggccagctcgtcaaggcatgtgggacatcaacggtcaaaaagatgaaggattgcggccacagcatattgaaagttatggcaatcctgttgaggcgacatggcagaaaattattaggccaccaggatgctcgtgatccgccgggctagcggatcttgctgagcttttactgcaagctcatgagtgtggctgaataatccta

SEQ ID NO: 4667 - DNA, 783 bp, Photorhabdus luminescens
  misc_feature (347)..(347): n is a, c, g, or t
  misc_feature (385)..(385): n is a, c, g, or t
  misc_feature (433)..(433): n is a, c, g, or t
aagctttacctccccctgaaccctgtacacgttcttccattaagtaacgggcagataaagcaaaacacaatccttgcatgaactttttagactcagcggtatcccctttagtcaggagcacactgccaatttccgggatgattttgctgattttttccaacacattaccatcctggctaaaatggaatgaataagcctccagcgctttcccattcgcgataaggtcgaagatcttattatcaattttttgtagcacatcccctttgattgccccacgatgttgagaagatgttgtcagcagatttttatccaacagtgctagcttattgaccggcaactgattaatnctgttttttgcctctttcagtacggccagatcttcttncatcaatcctgcactgaatcgtccatctgcctgtacaacaaactcggngttaacataactgctagtttcaactatagccgtggactggtaagcctctccagacaaaccactgccaagggcacccactcgctgcggtttagcattgtctctctgttacgcttactttggattagtcttgtgcctgaaccactttatccttagccacggcaatttcctgtttgcctcgattctccgcctcttggtaggcaacgttagcctcattattggctttttgcgctcgctgttgttgcactgtaccgcttcaaatcattcttttttaacatgtatgaccttttgtgcacaacaataccatgctgttactttgggctcaccagctcccattgggcatcgcttttttt

SEQ ID NO: 4668 - DNA, 840 bp, Photorhabdus luminescens
  misc_feature (11)..(11): n is a, c, g, or t
  misc_feature (29)..(30): n is a, c, g, or t
  misc_feature (43)..(43): n is a, c, g, or t
  misc_feature (49)..(49): n is a, c, g, or t
ctaccggaaanaccactgttagtaatcgnngctggggtcgtanagaagnaaacctgtctgcatgcaagctttgctgctcagaggaaatggcgggcgtgaacttattgcccggacgctgacagaaagaggtgccacagttgactattgtgaatgttatttccgccagcccgtagactacccggcagcagaattcagtgcccactggcaaaagtatggagtacaaactttagttgtaaccagtggcgaaatactgcaactgttatataacttaatacccgaaagtgatcgaaacaggtggttattgcattgccgcctgattgtggtaagcgaacgtcttgcacatgccgcccgaaatttgggctggcaggatgttaaagttgcaaaaagtgcagataacgacgccttaattcaggcactagaataaactgacatgggatgcccactatgacggagcaaaaacagtcctccgagacagttgaacaaacaaaaactacggttgaaaactcgcaacagctcgaaaccgtgcctcaaaagcaagaacgttctggcacgctaaaaaacataattgctattgcaatcatgctggcaatcggcggcggtctttattattacggacagcaacaagcccttcactgagtacagagaaccaccagctacgccaacaactggaatgatggaaaccacactatcccaggataaacaggatatctgaagcgctcgcgaaagaccatgccagactttacgccttccgccgtacatatgcactagtggccctaggttacaatatttgcacgcgcaaagtgttcgtctgcattcctatcgaaaagccgggtctagcca

SEQ ID NO: 4669 - DNA, 761 bp, Photorhabdus luminescens
aagcttgcatcctgatatcaatctgtccgtcgagtacgggtgagtcagcagtactttgcatatacagctcaaactcctgcaccagaaactgacctatccgcctggaggtggctagcgcatccggtgacgccatttttaccaacgtatgggccacttcggaatcaaaacgacgaccaaataagttgtcaatatattgggtagttgacttttctctgtgagcatcagcctgtaatgacagtaccaaaccatgtaactcagggtatgcctgtaactgactggcagcatcatcaaataacttgatagtttccttcgaggtgacttgtccggtgagccagagtcccctggcccgtccaatcaaaaacctcgcttccgggatattcgcggtttccaatcggctcataaaagcaatcagactttcactttcggtcttaggcgcttcccgttcagcggttgaattcgttcgggtcaccggggtaatctgccattcaataagacgattaatttcgccttgggtataccgccttttaaaccgaccacacgtgcggttccatcaaagatgacgcgttgcgtcagatgttcagcatgttgaggtggccacggcatcccaaggacgccagctgatacagctcgctgagcctgttagtgctctatcattcgggccattttacaacgtactatgcccacctgatcggtgcctatagcaaactgccttgggctatgcgttgtgccatcagccattccccgtataaccatcattattg

SEQ ID NO: 4670 - DNA, 693 bp, Photorhabdus luminescens
  misc_feature (642)..(642): n is a, c, g, or t
  misc_feature (688)..(688): n is a, c, g, or t
tttaagcgcgaccgccaaatcatcgcgttgctgatccgttaattcattcattcgacgcacatgaactttaggtaacaacatggtttcatagggccatgctgcccaataaggcacaaccgccaaccaatgggttgtatcgaccacaacccgctcaccatcagctaattcagcctgaatataatccatcaataaattagaactctgttcttggtaataagcacgcagttgtttatctttacgttcaatttcgtttggcagaaaactattcgcccagatttgcccatgtggatgaggctgagaacatcccattgcttcacccttattttcaaaaacttgaacccaaagatattccttacccagtatttcaatgtgctcattccaggtatcaatcaattgacgaatgtgtttaaccggcaattccggcaatgtcttactgtgatcgggaagaaaacagatcacgcgacttaatccttctaccccctgcgctttaaatagtggatgacatgatggtgggtaatcaggtgactcgagcattaaagccgaaaaatcattattaaaaacaaaggctccttgataagcaagatttttatcacccgaaatacgtgtatttggatggccaaaaaaacattgctcatcatagcntcggatattgtctatcaatggctgctcatcctgcccatgccacggnccgtt

SEQ ID NO: 4671 - DNA, 685 bp, Photorhabdus luminescens
  misc_feature (642)..(642): n is a, c, g, or t
ccagagcaggaacgttgctttttgcaaccttcatgctacggggtttgcgcaccagctggttaatagttgccattattaaaaaaactcctggtttttttgcttcgtaaacacggattaaatctcttgtctgccctaacggcaaaacacgaggacgcggaattttatggctgactcgccaaggtgtcaagaaatatacagctttttctcaactaccaagcgaattgttgatggtgttttaccgtcaggttaacaaagtcagtatagtcgatcacttgcactttgtctgaaacctgatcgtccaatccccgcgcctcaatatcttctttcagtgcatacaaggcagcaccacaactgatcaacgccgacagatagcaattaccctcaatacctgccagcacaccatcctgaataaacaagatgtcatcaccacgggcaagcagcttggatatcacattgaaatcacattgataaggcgatcggccaacagtatatagcatctcattgtccttccaatagctcagaatgtcagcacaacatcatagtcaaccagtttctcacggatcgttcctgcgggtatcacttttccattcagaacaaatgattgactgagctaatccacgcttacaagactttctggcacantaacattcttaatatcgtacaaaggcacaccttaaagtagcgt

SEQ ID NO: 4672 - DNA, 684 bp, Photorhabdus luminescens
  misc_feature (457)..(457): n is a, c, g, or t
gagttaatgtcagtgcattttcgtcggaaattatcgccgacgctgttctggcgttatagttcaccgcatcgattgattgaatatcttgacactgccaaaactgaactgactgagaacaaacattccttagatgactttattaatgcgatgcgtggtcttgatggcgaagcagcattaaggttacagcgcctcatagaaggaggaaagcatggataatctgcaccacatatatcattcgcttagtccggatgaacaacggatagctaaatctgccttgttggaacatttaagttccattactccctcagtaagtagtgcgggtgataccaaacagatgcctattgctattgtgggcatggctttccgactgcctggagcggaagattccccagagcaaatgtgggagatcttaagatctggacacagtgtaataaaagagattcccgagcagcggttngcatcccggaaaccctacgtcattccattgcccaaaaaagccttaaaaagccgggttgctcgatagtattgatggttttgatgcgccattctttggtatttctccgcgagttgcggccatgatggatcccgcacagagaatgctattagagctgacttggcagcgatcgagatagtggtgcgatccgcttggcattcaggatcaagacgggtgttttatttgctcgg

SEQ ID NO: 4673 - DNA, 700 bp, Photorhabdus luminescens
cgcagaagaagacaaaaatgatttcgctgaaaatagcgcttatgttcatgcaacgccggtgatccgtcgcctggcgcgtgaattcggcgttaacctggctaaagtgaaaggtacagggcgtaaaggccgtgttctgcgtgaagatgttcaggcttacgtgaaagacgcggttaaacgtgcagaatcggctcctgcatcagccggtggtggtctgccgggtatgttgccttggccgaaagtggatttcagcaaatttggtgaaattgaagaagttgagctgggtcgtattcagaaaatctctggtgctaacctgagccgtaactgggtggtgatcccacatgttacacagttcgacgaaacggatatcactgaagttgaaaacttccgtaaacagcagaatcaggaagctgaaaagacacagcttggcgtgaagattactccgctagtattcatcataaaagcggtagcaaaagcgctggaagagatgccccgctttacagctctatctcgcaagatggtcagaaactgacgcttgaaaatacattaacattggtgtggcagttgataccacctaatggtctggcggttccagtgttccgtgattgtaataagaaggggatcattggatccgtcccccaagctgactgaaatgtctaacaaaggcctggcacggcaactggaccgctctcgtatgcagggg

SEQ ID NO: 4674 - DNA, 697 bp, Photorhabdus luminescens
gaaggcagcaaaggtaaagttcagctattaggttctggttctattctgcgtcatgttcgtgaagcggcacagattctggctaacgattatggtgtgggttctgatgtgtacagcgtgacctcattcactgaactggctcgtgatggtcaggattgtgaacggtggaacatgttgcacccaacagaaacgccacgtgtaccttatgttgctcagatcatgaatgaagcaccagcagtggcttctactgattatatgaagttgttcgcagaacaaattcgtaacttcatccctgcaagtgaattccgcgtattgggtactgacggtttcggccgttccgatagccgtgaaaacctgcgtcatcatcttgaacgtgatgcttcctaccggatacttgctgcctttgggcgatttggctaagcgcggcgaaatcgctgtgagtgttgtggaagaagcaatcaccaaatacacccttaacccacaaaaagttaccccccgtctggcttaaaatggaaacgaatcactggctatcaaaattaaggtccccgatatcggtgccgaccaaggtgaagtccccgaatcatcgtgaaactcgcgactcagtggaagctgagccatcgctgatcaccccggaaggtgataaggcttccatggagttacatccacaggcgggtgttggtaacgagacatccttccgggt

SEQ ID NO: 4675 - DNA, 714 bp, Photorhabdus luminescens
  misc_feature (285)..(285): n is a, c, g, or t
taattcagctcgctggttttcttggtatcccaatgaataaaacgattgcatttggtgacggtatgaatgatgtggaaatgctttcaaccgtagctaaaggggtcatcatgggaacggcgcataatagggtaaaacaagctcttcctgatgccgatattattggttcttgttgtgaagagtctgtggctcattatttatctgaaaatatgtgctaggcaaacttggggcgttaggattcaaatcttggcgccctttgccaatagctgagctggctctatctcttgntctctgttcgctgaaacatatatcccgtgtattattctgtcctctcaaactaacttctattggtttcatttacaagctaatacgttatgaataattccatccggtcatagccgaacaactaaatgcgcatgctaatttcaccttatgaatttaaatagaaaaaattccacctcttccacattgacttatcttctagattacctgaacggcattcttttcaagatacttatgccttcatttttctgagtccctttgtggtcattgcggaatttacctctctacttcttcataggccagaaaatcttcaacccttatcctgactgcggcgatctcgtatggcgatctcatttcctatcacatataagcttcctttccccgaaggttaaccatggaaaacccctttacactgttatctcccaaatacattct

SEQ ID NO: 4676 - DNA, 683 bp, Photorhabdus luminescens
tctttggcttgtttgatggcacgacagatgataaatggggctggttagatccagtcaatccttaatagaactatacccaatggatttcaagagggatcgcgacggcaagggagcgaatccccgggagcatagagaactatgtgaccggggtgagtgagtgcagccaacaaagaggcaacttgaaagatgacgggtatataaataatttaacgggcggttcgttccccgcctgttttgataacacgggagtgaagataatgcctaagtaccgttctgccactacgactcatggccgcaatatggcaggagctcgcgctttatggcgcgcgacagggatgaccgatgcagatttcggtaaaccgattattgcagtagctaactcatttactcagtttgttccagggcatgtctatttgcgggacttaagtaaactggttgccggacagattgaagcattcggcggggttgcataagagttacatacgatagcggtggttgacggtctcccatcgcggatggagggctcctctattatttgacgtaactggaattgatcattcattctgctgaatatctggcgatgcccattgtgcggacgctatggcggtatccccacctcggacaaacttccgccaccatgctgagggtaccctcatccgaacatttcgccacccttgtctccg

SEQ ID NO: 4677 - DNA, 702 bp, Photorhabdus luminescens
tctacagcggacgcatgctacactaccacaaagaaatttatcggcagcacggcgtaaaattaatctcaggaaagcatttcagctttgtggctccgttacgggacaacatgtcgccatacttgatgatgtgattaccaccggtgcgaccatgaccgagatttcccgtttgttaattcgtgctggcgcccgttcagtgcaggtttgggcgatctgtcgaaccttgtagtcaatacgaaaatgggcgtattataaccaactatagcagtcaactattgagcaaatgatatgattaatattactgaagcagcgcaaactcattttgccaaattactggcaaaccaagaaccaggtacacaaattcgcgtatttgtcatcaatccaggtacacctactgctgagtgtggcgtatcttactgcccgcctgatgccgttgaagcaacagatactgaactgaaatttgatcaactgtcagcttacgtcgatgaactgagtgcccccttccttgaagaagctgaaattgattttgtcactgatcagttaggctctcagctaacattaaaagcccctaacgccaaaatgcgtaaagtttctgacgattccccacttgccgaacgtgtggaatacgttttgcagtcacaaattaatccacagttagcctgtcctggtggccgcgtcagtctgatggaatcactgatgatggtt

SEQ ID NO: 4678 - DNA, 766 bp, Photorhabdus luminescens
  misc_feature (456)..(456): n is a, c, g, or t
ttaatgattaatgtccaatatcgttcgcttgggatgttttgagtgaacgatattgtgctgtcagtaatatgaacagtctttttcttttcaggaaagatgaattatttcacattttctcagcattaccaggtattagcgtgttttgtttaaccaattggtgttaggctaatgtgggtttttttatgattttgtaaagttgtgttggttttatcgcttaacaggctaaaagccttgaatatagtaagaacagccttatttatagagtagttctgaaagtgcattgatttattaataaaggaagccggtttttatgatgcgaattgttttgttcctcctcactaacctcgctgttatgttggtgttcgggataatactttctttgacaggaattcaggggagtagtgtacaaggtttgatgattatggctggcctgttcggtttcggtggggcgtttgnttctctgctgatgtccaaatggatggccctgcgttctgtgggtggtcaggtcatcgaacagcccagcaacgaagttgaacatttggttagctcgaaactgttcgcagtcaagcggcaccagtcaatatttgccctgccccaggctgcgatttatgccgcgcctgatattaacccattcgctaccggagcgcgtcggaatgcttctcttgttgctgccagcagcggtccattggataacctgatttgggcataagctgcagctgtctttgctcatgagattagacctattgctaatggcgatacggtgacc

SEQ ID NO: 4679 - DNA, 686 bp, Photorhabdus luminescens
  misc_feature (528)..(528): n is a, c, g, or t
cttcccccggtgccggtaacgcccgacggtccagcttgccgtttggtgtcaaggggaaggtatccaggcgtacaaacgctgccggtaccatataatccggcaaaatagcgcttagatgagtacgcagatggttaaccaactcttcattcgcttctgctgctacataagctaccaaccgtttgtcctggctgtcaccctgtgccaacacaacagcttcactcaccgccggatgttccatcagccggacttcgatttcccccggctcaatacggaaaccacggattttcacttgctggtcattacggcctaggaattccagattaccgtctggcaggtaacgggccaaatccccggtgcggtacaagcgggcatccggcttatcactaaacggatctagcataaaaacttccgcggcccagtcacggcgattgagatagccacaggcacccccatctccaccgatataaatctcaccagttaccccctgtggcactggctgaccataggcatcttacagaatacacccgngttttgattatcgggccaccaatggggatccggctcacttcccgtcataatgccagaatggcggaagtggatagagaagtggaacactctattcggtcctacacctacattattccgttgacgcggtccattagccctcatcctcgccattacctttt

SEQ ID NO: 4680 - DNA, 767 bp, Photorhabdus luminescens
aagcttgcgatagccagccaccagatatgccaaatcatggcgaaaccaaacagcaaggtaaagccagcaataattacacccgcaccggcatttttaggcatatgaatttcttcatacttagcaggacgtttataagcagtgcctttttctttcatatcccaccatgcatcacgggtttgaacatgtggaacgtcagcaaagttataaaacggtggtggagaagatgttgcccactccagagtacgtccgccccacgggtcaccggtcaggtcacggttttggtcacggtcacggatactaacgtagaattggatgacctgacacaggataccaacggcaatcagtgcaacaccaatcgcggagacgaccagcagattatggaattcagggttgatatcttggctaatacgacgggtcatcctcataaatccgagcgcgtaaactggcataaaggcgataaagaagccggtgatccagaaccagaatgcgcggataccccatttttcattcagtgcgaaaccaaaagctttcgggaacccgtcagcattaccagcgaaacaaccgaagacaacaccaccgatgatcacgttatggaagtgtgccatccacgataagctgatatgcccaacgaactgtgcacctggaactgtcatggtaacgtcatcattccacccatcgataatgtgacactgatcccccgggcacaacattcgtggcctatacctcatactgtctccattctcatcgacatatccgtgaagatctag

SEQ ID NO: 4681 - DNA, 686 bp, Photorhabdus luminescens
attaaattaacacctctttctcagagattgtgccacattcatttaatgtctcacctacttgttgcaactgatacatctgataataacgtccacgactcacaaataattgttgatggcatccctgttcaacaactgcaccacgatgcagcaccagaatagtatcagcctccacaatggtagacagacgatgagcaatcacgatcaatgttgtttgttgacgaatcaatctcaaagcctgttgtaccgcctgttccgtaccagaatcaatatttgcagtcgcttcatcaaggatcaaaatttgtggcgtttgcactaacactctcgccatagcaagcaattgtttttgaccggctgacaacgtattaccctgctctcccaagatagtatgaagtccatcaggcaatgtacgtactaactcagctaattgaaccgtttccagtacttgccaaaccttgtgcttctgaaatattccgaccaagcgtaatattgtcaaagaaagagtccgtaagaacaaccgggtcctgctgaactattggcacaccattgcctaatacctaatgagacaaagatgataccggccctgccatcagataaattgcacctttttgtcccctggtatattccatgtacaaaccggcccagctccttttaccacttcccttgcgacccaccaccgccacagacct

SEQ ID NO: 4682 - DNA, 778 bp, Photorhabdus luminescens
aagctttttgctcaggatcatcaatagccgccagctcctcagcaatgtattcaccgtaatgcggtaagtcagctcttggtggaatagaaccgccagacaacaccgataaatagttttccataaactcaacttgcaggttggcaacactccaaccgtcaagaatggcatgttgatgagatagaaccagtgcaaatgtattattagcatcaatacatacattaactcgccacatcaattcattttcaacgaaaaagtggctattttcctgttccagacaatggtctaattgatgctcaaattcctgcacagaaaggtgacgccaatcattgagtgtaaccggcaaagcaatcgttttatgaatatattgcaacgctctccctaattcgaagttgtatgtcgcacgcaataactcatggcgttgtactatggcattaaacgcttgacgaaatgcttgttcactccacacggcattaatcaaataatgctctacaatatggtaactttcatcttttagctgatgataaatagaccccatttgcaaacttgacaatgaatatgcatcatccaatgttgactgctcaatcaatgcccgccgttcgtcatccgtgagtaatgaaaaagcgtgataagcctctttagaagagacaattgtgcggttcacatcacgttacctgctgcgttatctcatcaatactttgatagggccaaaatatcttttacactgagtgccaaaccccctgttagccatcgtatcacacgcacaataatattgagtcgc

SEQ ID NO: 4683 - DNA, 681 bp, Photorhabdus luminescens
  misc_feature (256)..(256): n is a, c, g, or t
  misc_feature (279)..(279): n is a, c, g, or t
tatcaggcttatcgtcaggggcaggctaacccattatcggctttggagattcagtatgccgattatgcggtctggcagagtagcccagagagacaggctcagctagcggcagggttagcctattggcagcaacagttgtcggatttacccccggtacacggcttgcctctggattacgggcgaccagctaaccaaaccagtcatggccgcagttatgaatttagtctgaacaatgaggttagtaagaggttgcagnaactggcactgacgcagggctgnactctttttatggcgtaacatgcggcgtttacggtgttactcattccgcatatcgggcaacgagatattgtggaggcatacccggtagctaaccgcctgcacatttcattaaccgtgctgatatgctgttgcatgaatacgctggtgcagcacatttagtgtgggtggaaacaacagttatcgattacttgatcttcgttccgcaaaaaattcgggttatccatcgcttgatcacgtttctaaagagtctttgtcgaactatttttcacctgaacatctttcccccaatatactaagacaactaatcatatatgttttaaacgaactcctattcacattcactttgaagtatgtacaagcaccagcttcgaaaataccataagtatattctgcgctcctata

SEQ ID NO: 4684 - DNA, 761 bp, Photorhabdus luminescens
  misc_feature (565)..(565): n is a, c, g, or t
aagctttgatgagtggattgagaaactgaaaaaagcgtctgtttttgcttttgataccgaaactgacagccttgatactttgactgctaatctggtgggggtgtcattcgcaatttctgccggcgatgcggcttatctacctctagggcatgactatctgggcgcgcctgaacaacttgacagagaagttgtgttggctgcattaaaaccgctacttgaagatagtaacctgctgaaaattggtcagaatattaagtttgatcgtggcgtgttggcgcgttacggcattgaactgcaaggcattgcttacgataccatgctggaatcttacgtacttaatagcgttgcaggcatgggtcggcatgatatggatagcttggctgaacgccatttgaatcataagaccacgacttttgaagagattgctggtaaaggtaaaaatcagctcacttttaatcaggtcgcggtggaacaggccgcaatgtacgccgcagaagatgcagatgttactttattgctgcatcaggctatgtggccgcaattggagacagcgccgacgctaganaaggtattcctgaatacagaaatgccactggttatggtgctctcccgcatggaacgtacaggtgtacttattgatgccaatattttggctgagcatcaaaagagccactgcccgtctgatgagtggaaaagaaggcacgaatagcagtgaagttttcatctggctcgccaaaccagtacagagatattgttgaaaa

SEQ ID NO: 4685 - DNA, 776 bp, Photorhabdus luminescens
aagcttacgtagctttaattgaatcagggcccaagaaaaagaaccaaccggagcgacaacactatgacattcatattgcttaggatcaaactggcattcattttcaagcttaataacctcagacatattatttccttatatctataaataattaaaaattaaaccacatgatttaactttcaatttattattaaacattcagtaaatttttatgaattaatgcaaccggcataaaacttaagattcaattataacaggatataccgctcattctccttatcgttttttgatacttatcaataaattagcattaacctcagaaattagagttgaaaattattattcgaaaccgtgacaccttaaatattttattgactatgagttttacaatatttaattaaatcgctaactacaacaaacattcaaccaaaacatacggtaaagttgtaaattcagttaaccacaataaacacggctaaaaaaccagatgatatgaacgctccgagttgaaaacttcatccgctaaaaggggctgattgtaacaaaatgggcagtactgaaatgtggacagaaatgcaatctcagtatgaagctatggattgcctctcacacaaaagaccagaataaaaccgatggaatatcctgtttgcagcgccgcggaatttatccacgacactcgcgatctctcttattaacgatagacatcaataaattaacatacctacacctgcatattcataatctcctgataagaagccgttagcttattttttgct

SEQ ID NO: 4686 - DNA, 774 bp, Photorhabdus luminescens
agtggtccggctgatgatagcgatcgaatcttgcgctgttgcatccagtcccttttcacccaaggtgatagcgccttttttcacttccaaggccgctaatgcgccatctttatcaaataccggtttaccggtcgataaggtgacagccggagtattaacaaagcgacaaccattacaggtcataccgttcgggttaacaatgaagacattagctttctgccctgcaacttccaacagcccttgcagatttgaggctaaggtacccaccacttcattaataatcagttcagccgattgaccgttgaagtgagggttcgccccaatttgtcccgccagtacggattgggtagcttcggtagcattattgagcaccagcccggaagccccaacattaaactcctgataacggttatgtgaaacaccacgggcgttaggtgccgcaatatgaataatagggtgattgtttttcgaggtgatccgagtttgcttatccgccagtttaatccctgggacttctccttctacttctgaggcgtttatggtcagttgaggagcatggcttaacgcacatgcaatcagcgcagaagtgactggcgtatatttcccttcaactgagttatacctccctgacggtgaatgtaactctgcgttgttttgacaatgcagtcaccccttttgccgacaaagttgcctcaatatcaataatgtcaccaccagcattaaggggtaaattattgccggcagtgatgatactgctcgctatgggtaattgaa

SEQ ID NO: 4687 - DNA, 784 bp, Photorhabdus luminescens
  misc_feature (463)..(463): n is a, c, g, or t
  misc_feature (625)..(625): n is a, c, g, or t
caagctttctgcacccacaaattcaatctgttgaatggtgtggcaaacaaattcagctgcatccgacgttaaaacgggggatggggatacggtgatattgttacgcagcgcttcccgctgttgttgggcttgctgcaacaaggctttttgttgttgcgtgatagtttcttgatccgccgagctgacaggaattgccgcctgtgccagtgcggagattgtcagcagaataagcccagtcaggctgcggtgataaaacggtaattttcccatagatgataattaaaaatttgataatgatattattaaactattctaatgtggtattaatttcccgtctgagtgggcagtgtgaaatgtgatcaatgtctggatctttaatcctgacaatgggaaatcggatatattaaatgctgtaaagtggtgataagaatgaaggtaattttttatacatcaataccaattncttcaagttgcttaatggttttgcgtcccaaatccagcaggcgtgcgatatcctgctgactattctccagcgcattcgttgacccggtagcgagtaacggtgtcagttttcaagcgtgaattgattgcttagcggtgtttttaaatagactggttgactaanagtttgaaaaatttacccgcttttaatgattcaaggcacaaattaaataaaaagcgtttaactcttaaaaaagagatctattctatatttaggatatctttttttacgctttctatccttggtttcattaaaataggttccgcatgtgattttatattt

SEQ ID NO: 4688 - DNA, 773 bp, Photorhabdus luminescens
  misc_feature (598)..(598): n is a, c, g, or t
aagcttttgtcatcattagcagttggcaactcatactcttcaattctttgtgccctccacggagaaaatctcgcggagggcaggacctattacgcactatgctttagcaacatagacttaatatggcctatagcttttgttggattcaaccccttagggcacacactgacacaattcatgatgctatggcagcggaaaacactgaaagcatcattcagcttatctaatcgtgaagccgtttcagtatcacggctgtcaatcaggaagcgatatgctgccagtaagcccgcaggcccaataaatttatcaggattccaccagaatgacggacaggaagttgaacaacaagcacacagaatacactcgtacagaccatcgagtttttccctttgcgcaggtgactgcaaatgttcacgtgccggtgggtttttaccgtcattcagcaaatatgggcgaatcttctcatattgcgcatagaattgccccatatcgaccaccaaatcacgaattaccgggcaacctggcaacggacggataacaattttcttgctaccacgcccgaaagccgaaacaggcgtaatacaagccagaccatttntaccattcatgttgaggccctcagaaccacaacacctttacggcaaaacgaccgaagagagtgttggtcctgtctttaagctggataacgcattcagtacatcatgttacgccttcttctgcttcagcgcgaatcctgatatgagagcgctgcaccatcgggtggaaccataatc

SEQ ID NO: 4689 - DNA, 776 bp, Photorhabdus luminescens
  misc_feature (517)..(517): n is a, c, g, or t
  misc_feature (609)..(609): n is a, c, g, or t
agcttcacaaattcgctcaaacccaccaccaaaactttcacgacgatgccccgtcaccagaatcatttttttattagtatcaataaacgggtaatgcttcgctagcttactccgcatagcctcatcattcattattcgatcgcgtacccacagcaacgcatcaattactgtatttccggtaacaaaaacccgattatctgcaatggattctttcaataaattattgtgggaattttccgtcggagcgaaatgatacattgccagatgccctgcaatcttacggtttgcctcttccggccaaggggaataaagatcacccgttcttaatccagcttcaatgtgaccaacagggatacgttgatagaacgctgccaaactggttgccattgttgttgtcgtatctccgtgaaccaatacaacatcaggtttaaattctgctaaaacaggtttcaatcctgccaaaatacgacaggtaatatccgttagatcttgccctgatttcataatattgagatcnaaatcgggagtgatctcaaaaaggtgtaacacctgatccaacatttcccgatgttgggcggtgacacatactttcgctttcaaggcttcatnccttgccaacgcgtgtactaacggagccatcttgatagccctccggtcgagtaccaaacacagccaacactttcacagtgactctcttatagtccacaaccttgcgattttcctgcaaacaatactcttaatgctatttactcctgcctgctgagctgcacagaaat

SEQ ID NO: 4690 - DNA, 777 bp, Photorhabdus luminescens
  misc_feature (698)..(698): n is a, c, g, or t
aagcttgatgatatctcacggctaacctccagcatcggtggtgatgtggcggagcattgggcgatgcgacagggccattcctttgactgctggctgatgcaaccagtagataaagcaatgccggtgattacccgcaatatcgaccgcagtatctggcgcgatctcatgctgaagtccgggatgttgacgttaatggacgctgaggcgtgtagtcagtgggctaagaacctcgaagaaggcgatcttccggcaatcagcgaagcgaatatcctgagtacgtttgagcagcttcatcacaacaaacaggaggtctttgaacgtggcatcatcaatgtgttcaggggattaagctgggactacaaaaccaataatccctgctgtttcggcaagaagatcatcatcaacaatctggtgaagcatgaccgatggggctacagcctgaactggggctggcggcgtgatcagttagccgatctggaacggatgcttcacctgctggatggtaaaaccattcccgataatcggcatgatgtttctatccggtttatggatttttgccgcgattatccacatcagcaggtcttcgaggatgatctctctatcattcgttattttcagaaaggcagcggacatatcacgtttatacgccctgatctggtagagaagatgaatgatatcgtggccaagcattatcctgnggcgctaccaccaaaataaacgctatctgcgtaatgagcttcaccagggatatctggcatactaagcgattacagcata

SEQ ID NO: 4691 - DNA, 770 bp, Photorhabdus luminescens
aagctttaaacttacacaagtaaaatctggaagcaattcgcaaatttagttgtaattttggtctggttaaattgtaaggaaaccagctaaaagccagtatacctgaattagcggcttatgaagttttagatactgtgcccgtatcgttttcttttgaacatgctgcggaacttttccaaggtttggttaaccttagcccgcgcaaagtagaaatactccttcattccagtcatgcgatccaaactaatcgtttatatctttttttgaccgactattattcccacgaatgggctaagcgcattgataaaactaaaattgctttaggagcagggaagcgtcaagtcgtgttagggggaaagttggataaacagtatcagattacggttccggaaaagtatttgaataatggattatttcatggataaatattctccatattaccgacaagtagtgttgttaatgagtgtactgcctgtagtggcgacagagagctgttgtgcattgaaaggtgggacggcgattaatttgtttgtacgtgattttcccccgttgccggtaaaaatctcatattcgatatacaaacctggcatcgattcgaattagcatattatcgttgatgacaaggagatatttttgtctatctgaaacagacttttagttgaatatacctggaaaataacttcaaacagaatacttcttttaggtacatgattaaatcaggatctacttttcctcatagccagattatgaattgtgtgctttaataatgg

SEQ ID NO: 4692 - DNA, 777 bp, Photorhabdus luminescens
  misc_feature (777)..(777): n is a, c, g, or t
aagctttgatagacgtctatagtggaaaaattcccgggaataaaatgttctttaattctgatatacttaaatattatacaacagaaggagcacccgcatttttcaattcacaaacctttgccaatgaatttgttccacaaagtatagatgatttgaaatcagtactatttgaacatattttaaatgattggcgagatgttatttcccataaaataaccgttcctactttaattttttcaggtgaaaacagcgactggatagaaagccaacaatggatttcatctactgtaccaaaaggggaaattataatttatggtcgggaagagcatggagatcacttcttagcgcttaaagatccattaagattttcaaaggatctttctgctttcttttattaaaaaacaggagaaaagaatgtttaccggactaagtgcttttcctttaacaccgctgtatggcaacaaggtagatgagaagacatttatctcgcttattgaaaatcttgttgaagctggagtggattctatcggcgcactgggatcgaccggtagctacgcctatcttacattatcggagcgcgcgcatgtcgcccgactggctgttgaacatgcgaacaagttaccggtgatggtcaacattggagccctgcttggagcggatatactcagcccttgctgaagatgctcaacacgccgggtgtagcgccctaatgctggcacctgtttccttaccagcttccacacccgaagaaggtgatttctctctatgaagaagtcn

SEQ ID NO: 4693 - DNA, 390 bp, Photorhabdus luminescens
gagtgtggttgataactaccagcatattaatcagttcctgccgcaacagacaattaaagatgcctgtcaagggttccggcattgtcttattagtcaggtttatcgccagcaatattctcatatattgccgctattgggttctctgaaagggattggtgcgactcaccttcatgatgggcgacagcaaggactgatgacgcgtggacgactgattgctctggaacaggcttatccacgagaaaacgaacagttacctcttagctatcaggtggtttttggagtgattcatcgtgactaagcgctggtttttgacgggtacagataccgaagtggggaaaacagttgtaagttgcgctttgttacaagcggcaactaaagcaggatataaaa

SEQ ID NO: 4694 - DNA, 761 bp, Photorhabdus luminescens
  misc_feature (711)..(711): n is a, c, g, or t
aagcttatattaggttggatacgccagaacagcgagttaaggattatattcagatcattgattatctgaaacatcagaataaatataacaagatcattattttgggtggaagtgaaggggcagtggttgctaatttaattacatcacaagtcaattatattgatagaactgtgtcactgaatggtggaggtcggtatttcgctgatgatgttattcatagtataaaaagtgaagcgccaccagaatatctcaatgaagagattaaaggatttagggattttcagcaaaaaatagctgccggggataatatgagtcatatagaaatgagtaatcatggtgctaattggtggagagtctcacttggtattgatcaatataaagtgttaagtcagactaaaagacctattctgattattcaaacactaaatgataattcagttaaccctagtgccacgatgaaaatggaagagcattaaagaaagagaatattaccttttattcataccctggcctaagtcatggatttagacatagtgaaggtgttttgcaattactcctattgttgaggatataaagaacttggtggcccgagattatggataaaagtctggtttctaaagtatattaattcgtcggtggttcttctatattgcaaagtgatattaaatttagtaataaaacgtggtatagttaaaattgacaccacgtttnttttaagatatttttcctattaactgctatcaatttattctcattggcaa

SEQ ID NO: 4695 - DNA, 386 bp, Photorhabdus luminescens
atccaccagaagaaaatgcaacatgaatgaatctctgagccaaattattgcaagtgagctacaggcgcagccacaacaggtactttctgcgattagcctgcttgatgaagggaatactgtcccttttattgcacgatatcgtaaagaggtcaccggcggtctggatgacacccaacttcgccaacttgagacccgccttagttatctacgcgaactgtcggaccgccgccaaaccattcttaaatccattgacgagcaaggtaagctaaccccagaactgaccgaagccattaatggcacccagagcaaaacagagctggaagatctttatctgccatataaaccgaagcgtcgtacccgtggacaaatcgctattgaagccggtc

SEQ ID NO: 4696 - DNA, 776 bp, Photorhabdus luminescens
aagcttgcatcctgatatcaatctgtccgtcgagtacgggtgagtcagcagtactttgcatatacagctcaaactcctgcaccagaaactgacctatccgcctggaggtggctagcgcatccggtgacgccatttttaccaacgtatgggccacttcggaatcaaaacgacgaccaaataagttgtcaatatattgggtagttgacttttctctgtgagcatcagcctgtaatgacagtaccaaaccatgtaactcagggtatgcctgtaactgactggcagcatcatcaaataacttgatagtttccttcgaggtgacttgtccggtgagccagagtcccctggcccgtccaatcaaaaacctcgcttccgggatattcgcggtttccaatcggctcataaaagcaatcagactttcactttcggtcttaggcgcttcccgttcagcggttgaatttcgtccgggtcaacggggtaatctgccattcaataagacgattaatttcgttttggggtataccggcttttaaaccgaaaacacgttcgggtccattaaagaagacgcgttgcgtaagaagttcagcatgttggggtgccccggtgatcccaaggacccagggggttccaacttcgtgagccgggaaagctttattatttcgggccatttaaaaacgtactaaggtcccctgagtggggcgggagagaaaacttctttgggtattgggtgggcaaataaatatcccccgttaaggaagaattttgcggttaatgcgaag

SEQ ID NO: 4697 - DNA, 396 bp, Photorhabdus luminescens
tactgtccgcgggaagctggatgttcaaaataaccgctgtattcgtcaggtacagtggttttttgtttgatcaatttgtttgatcaaatagcactgagcgcaggcccttccttcagataggggataagtagttatcggagtgtgtaaacttgacgttaaacactccgaattttttgacattaagtggatgtcccgccgtaaccgaatagcggctggcgtagccagagggcggggagataccctcttgtatgatttaaagggatttttgatgggaaaagcatctaatagaagtgcagtgtacctctttacaggaagatattacgacgataatggcggtaatcgtattactgctgttggggctggtggtgaagtttatgcttatggcggaaatgacga

SEQ ID NO: 4698 - DNA, 778 bp, Photorhabdus luminescens
  misc_feature (307)..(307): n is a, c, g, or t
  misc_feature (376)..(376): n is a, c, g, or t
  misc_feature (693)..(693): n is a, c, g, or t
aagcttattggaaaagctaattccggtaggtgcaccacctctttagccgactgacatacaccaaatagtgggtgaaatgtaatggagcaatcttcgataaaactttatatccaaaattagcagcagtttaccccagtggcggatgaccgatataccctaaagatttcaagatgcatcgcgacggcaagggagtgaatccccgggagcatagataactatgtgaccggggtgagcgagtgcagccaacaaagaggcaacttgaaagataacgagtataggggtatcaaagccacataacctagcgttnaactatatgatgagggcagcataatgagcacgttggtacttgaagaaatcccggtaggaataccacttncttggccgactgacataccaccaaatgggtgggtgaaatgccatggagcgatcttcgatcacactttatatccataatccgcgcaagcttaccctactgtcatattaccctgtctacggggggaatttatccggggccaggataatgggcctggggaggattttggtctatattttatatcaccggccacttagcatatctggcgtaacattaaaacaagggttgctcggttgtacgccaactttaatggctgacccgactgggcaacggcactgggccactttctaattagctgcgaccaaacatcttctgcgganttgttctaccggtatattctacatccctgtttcgtttaccgaggtaaagccgctattatatcaaagcaataatggaagaataaat

SEQ ID NO: 4699 - DNA, 410 bp, Photorhabdus luminescens
  misc_feature (114)..(114): n is a, c, g, or t
  misc_feature (171)..(171): n is a, c, g, or t
ttatcatcaatgttgcctctggcagcattaaaccggaagatacaaatatcacctatggtactggtgatggggccgaggctcttaagttcactggcgcactaggggcaacggttnctcagggggctacagtgtcggcggttcctgatctattcgctgtgattaaaacgcagnctcagcaatgggcatgttttacgacggtatttgaatgtacagatgaacagcatcttgcattatccgcgtgggctagtagtcaggtatatcgctattcctatgttgcctgaacaacaagcggcaccgccaaagtgaaaggcagtcaggaaactatcgcccataaaattattggcattcacagctacgggagtggcgctccctgattctgctttgataacatgaaaccggcagcagtattg

SEQ ID NO: 4700 - DNA, 769 bp, Photorhabdus luminescens
aagctttactgccttgagcgaatcaatgcccaaatcagcccaagtgcgcggcatcattgattcagtaaaatcttcgtcccaatgcaggaaatccgccagcaacgtgcgtaattgcccggaaaccgatttacctactttaccttctatctgatgtgcggcagatcgtggcccagacagagcacgaacctgaacaataatctcggaaataaactcagatgcctctaccccattgagcagatagtgattaaaggccagaacgaggctcatctctttgttgtgaggcgcaccaatgaacaatgttgactgagatggcggcacaataacaggtacggcaaaggtagcaccatcgttgccggtataggagatcatcataggaacatcaatatcaacaggcagtttttccgcatcgggatcaagtacaccattcaagtgttgcctgaactcaaaaaagctcatggtctgcgtgttcggtacttttaatgaactcaaatcgcctttctcatccaaaaaagccatacccaagttgatatcccgataagtgtgataacgctcctgacaagcgggctcaaacgcacattgggcaattttctcacgcctgagaaatcgcattatttatgacctgaaatggggtatccactcctgctgcacggatgtttccgtacatgatgaatggccttttcaactagctcatcccgttttgttcaactgccccacaaggttggccctgaaatcttccgacctgttgcccgataaaaccctgttgtctttg

SEQ ID NO: 4701 - DNA, 772 bp, Photorhabdus luminescens
  misc_feature (99)..(99): n is a, c, g, or t
  misc_feature (109)..(109): n is a, c, g, or t
  misc_feature (124)..(124): n is a, c, g, or t
  misc_feature (215)..(215): n is a, c, g, or t
  misc_feature (221)..(221): n is a, c, g, or t
  misc_feature (224)..(224): n is a, c, g, or t
  misc_feature (229)..(229): n is a, c, g, or t
  misc_feature (248)..(248): n is a, c, g, or t
  misc_feature (257)..(257): n is a, c, g, or t
  misc_feature (259)..(259): n is a, c, g, or t
  misc_feature (266)..(266): n is a, c, g, or t
  misc_feature (299)..(299): n is a, c, g, or t
  misc_feature (304)..(305): n is a, c, g, or t
  misc_feature (307)..(307): n is a, c, g, or t
  misc_feature (324)..(324): n is a, c, g, or t
  misc_feature (339)..(339): n is a, c, g, or t
  misc_feature (346)..(346): n is a, c, g, or t
  misc_feature (351)..(351): n is a, c, g, or t
aagcttgggctatactaatatattaacagcagaaaccaaaagccctaacggcagagtgaccaacgtgaccatcaacagctcaatcgatttgaatgccanaaaacctaancatgcaatcactgtnatcacatgataaataaactgcggcatgatagaaatagctctggacatatcactcacatcatgatgttaaactggcctggactttatgcccnccaatncgntccanaatagcataaggggtattnaagatacgntncactaangtactacgaacttcaaaaataattttgacgctnaactnngncattaagtaattagcanaagaactcacaacanacaagcnggcangcccgatgaagaatggaactgtccatgatactaagtcagcgctaatctgctctaatgcatcatcggtaatcaaggaaattaaccaaatactaacgaaagcactaaaagcacccacaatactattaaaaataatttttaaccgagtggctttaaccatatcagagatcatcgatattgacttccaagataaatcctattatcgccaaattttaacaaccttcacttttccacagagagatcttccatccgcccataaaaccttcggtaattattttcggcggtcaccaaagacattgtgggtaaaaccactctccccttaatttgaaaatcatcacttataactttatctaaacttgattttacccctttcgaaatccctaaatgaccccaactaagttctacgtttaaatactaaccggaa

SEQ ID NO: 4702 - DNA, 790 bp, Photorhabdus luminescens
agcttgaaaatgaactttcactgacgctgaggtctgaggcatagcgaaggggcagtcaatcagactcactgaggccagatgaaatcaaatttaattgcttcagtgacaagtttgccatcttcgccactgcatcacatgattcagcgttataccatgtcagatgcgcattttgagcgcatctgccagctcatatatcaacgtgcgggtattgtgctagctgcacataaacgggagatggtttacaaccgtttaattcggcgtttgcgtaccctcgaaatacgtgattttgggcaatacctgttcattcttgaaaatgatctgaatagtgaggagtggcaggaatttatcaatgcattgacaactaacctgacggcgtttttcagggaagcgcatcattttcctctgttagctaaacatgcaagtaagaagaatggatccgaccgggtatggattgcagcatcatcgacaggagaagagtccttattcattgcactgacactaagtgatgtcttacgggagcgtttccaccgggcaaacatcattgccagtgatattgatacccatgttttggaaaaaagcactcaaggcggttatcgacgggatgatttgcgccacctgaccgatcaacacgagaatacgtcacttctttaaagggattggatcttatgaaggctatgcttgagtccgggcgcactttgctgacatggttacattcaaacctataaaccttgttagaacccatttggaccgcgtgaagaaaagtttggatgccatcctttgcccacagtaa

SEQ ID NO: 4703 - DNA, 402 bp, Photorhabdus luminescens
  misc_feature (73)..(73): n is a, c, g, or t
  misc_feature (100)..(100): n is a, c, g, or t
  misc_feature (141)..(141): n is a, c, g, or t
  misc_feature (158)..(158): n is a, c, g, or t
  misc_feature (176)..(176): n is a, c, g, or t
  misc_feature (208)..(208): n is a, c, g, or t
tgccgaaacggctacagtaccatccactgacaacgccccagatttatccaacatcaatcccccattgggctgnagccttaacgcaagcccctccggtttnaccgcgatgccattgccagtcttaaccgccaaacggttgtngataacctgcaaaccgncccccggatgataagctngagcaccatcctgccaaccaaaaagctgtcgncacaacgtggcccaatcaatcagcgaataaaacgccgcctcagtcgggatcttgccaggggcgatatgggtaccaatctgactgaccgcttcatctgttatctctttcaccatcgtcttgttcctcatttagctaggccgaaaggtaaacttttccttcgccacttctcaaaccactggcaccaatcagtaatg

SEQ ID NO: 4704 - DNA, 769 bp, Photorhabdus luminescens
aagcttaaccaaagcatctaacccgaatgtggggaagacttttatcaggtttcctgtagctaaaagaatgtacataagggataaactccgttcttatatccggcatacctaatccgataaattaattctatgctcgctttctttattacggatattactaatgcgcttcccctttttcctttgtaatatttaatactttcacatctgcctaatctggcctgcccccttatatgtatttcacaatagcttttctacgtcactgactcatcacgttttaccgcaaaaaatatacgaacatctatctatacccgtcatctttcaagttgcctctttgttggctgcacttactcaccccggtcacatagttacctatgctcccggggattcgttcccttgccgtcgcgatgcatcttgaaatccatagggtatacatatggagttaaatcgatcttatgaacaaaaaagcacaatattcatccactctggaacaaagcacaaaatacacgtttttatttatcctttcagtcactgtattcttcgttggcgcaaccgaattcatgttgtcatccatgcttacccctcttgcagtcgccttcgggacaacggcgatcggagcatcctggctggatccagctatgcattttcttacgctctggcagcacctatatttgggtatttttcagatcgtattaacagaagcagattacttatgatttctctgctgtttttcgccgcagatggcctcgctataactcttgcccccactcta

SEQ ID NO: 4705 - DNA, 380 bp, Photorhabdus luminescens
  misc_feature (203)..(203): n is a, c, g, or t
  misc_feature (205)..(205): n is a, c, g, or t
ctatgacacaacgagctggtcgggcaggacggttagaagccggtgtgtgttggcatctattcagccaagaacaggcagaaagagcggtagagcatagtgagcccgaaattctgaatgctgatctcagtagcttatggctctccttattgcagtgggggtgtcatgatatttctcaattgcactggctagatataccacctgcngnggctctggcggtggctaagtcgctgttattacagttaggtgcaatcagtaacagtggtcagttaacgtccagaggcagtaaaatggcggaatccggtagtgatccgcgtctggcaacgatgttatgtgcggagtcggaacaaggggccgatatgctggcaacccggcgttatgct

SEQ ID NO: 4706 - DNA, 755 bp, Photorhabdus luminescens
aagcttgttgacgcagtaattcggtatttacattatttgtcatgatttttttctcctaaagacacttgtgtgaggggttttcgccggtagaaagtggctagctgctggcataaccaactcaatccagcacaaacagtcattacaagggccatagcaaaaggggtttcatcttgtagtaaagagacggcaacactggcgaatgccgccatagcaaattgtgcggaaatagcgagcgcactggcgctgccggcaagttgaccgcgatgttgaagtaataaagagaggctgttagtaccaatggcattaaccagcgagataaacagtacgaccaaaatgacgatcaccgtcagactttgctgataaaagataaccaataagatgccgaacagtaattgagcactggtttggataaataacagacgggaaacatcgtagacttttagtaaacggacattgagcagcactactgccatcatgcctagcgcattacaggcgaacagtaagccgtagtaattcgccggaacctgaaaatagttgatatagacgaaaggggaaccactgatatatgcgaacatggcggcacaagtgaatgccaatgtgccgatagttgccatagcttcacccgcagtcagtaacttggccgtatttttaaacgcagtgataagttttccgccggtatgctgggcgggtagcgtttctggcaagaaaaatagtaataatattcactgatacaaccgaacaggcccaatagcgtt

SEQ ID NO: 4707 - DNA, 573 bp, Photorhabdus luminescens
tgatggatgaagaaatcgaaacttatgagcaggagagcgagattccggcaaccagcttgatgatggttggagattctcttcctgcttttggtattgtcgctgctgttatgggggttgttaatgctttggggtcggcagatcgcccggcaggagaacttggcgtgctgattgctcatgcaatggttgggacattcctcggtattttgctggcatatggttttatctcgccattggcaacattgctacgtcagcgcagcggtgaacatcttaaaatgatgcaatgcattaaagtgacattattgtccagcctgaatggttatgctccacaaattgcggttgaattcggtcgtaaaacactctacctcacagatcgcccttctttcactgaattggaagaacatgttcgccgggtaaaagcacctgttcagcaagaaactgaaaaacaggtatgaaaacgcgtaacgtctcagtctttagggcaaaaagacgtaaaaggaatggcatcaaacatcatggtggctcatggaaaattgcttatgctgattttatgactgccatgatggcatttttttc

SEQ ID NO: 4708 - DNA, 769 bp, Photorhabdus luminescens
  misc_feature (742)..(742): n is a, c, g, or t
  misc_feature (769)..(769): n is a, c, g, or t
taattaatagtttaggcaaaacttatcaggaaatcttcgatgaaggattaattccttataaaactaagccatcaggttatcccggagactctgatatatctcttgatatggctaaagaagggattttcttatcatttttgcgagaaaataaagtacttacagagataacgttaactttcattaatcacaaacgacctaattttatatttcctaataaattgccttcccctttgataccgctgatgtcccggaaattaattcatcagcattttggtaaacctgaaaaatcacttccaccaaggaaaaggttaactaaagaaattggctggactgaattatataccttattggatttccgtattccaactagcatgcaggttgattacgatttgcaggaacgagtcagactagtgacttttttacctacctcagaaatccgttggtaatcaataaagagattcttatttagaactttaactattcggatatgcggaatttgacttattcacttctcattacttttcaataaactatttttcttaaaaaaaacaatgaacatacaccaagaatattcattgtattggtttttttgtaaattaatcatcaatataagtaaatgtttattataagtaattatataaaggtaaagttattttattgtctgtattttgttttttaatgtaagcaagttttgtgatttattatatttttcatcacacatcatcactgtgtatggcgtctntggaaggtcgtgctaactgatgttctn

SEQ ID NO: 4709 - DNA, 380 bp, Photorhabdus luminescens
ccagtatcggtgtcgcaatgggaagcggtaccgatgtcgctctggaaaccgcagatgcagcattgactcacaaccgtctgaccggtttgtcggaaatcatcaccctttcccgcgcaacgcacaataatatccgccaaaacattgctattgcattggggctaaaagggatcttccttgttaccagcctattgggtatcacaggcttgtggatggcagtactggcagattctggcgcaaccgctcttgtgacggcaaacgcggtaaggttattgaggattaaactgaaataatgaaaatcgtctagctatttaaggatatgagtcttattcgcggctcatatcctgtgccatagtaagatgaattcagtggtgaaagcccat

SEQ ID NO: 4710 - DNA, 765 bp, Photorhabdus luminescens
  misc_feature (576)..(576): n is a, c, g, or t
  misc_feature (615)..(615): n is a, c, g, or t
aagcttaaatccgaccagattaaccgttttatctcttttttattgcattatttttatagcttacgccttaaaatgacggtgagaaaacatctcactttcagttcattaaaaaactttctctatcgtgctgattgttttttaacttgccattaatggttaatgggtttcgattaaatgtcattaactgccctgctaaaaagtgaattttattatgttaaatcaagctgttatataaatcctttaatctatccgcactcgtattttcaaatgattatggccgtaaataggccgtttttaatcactctataccttttacaaatctggcattaatggagtacctgtttttaccccttagctgactcatcaacgataaaaaggattttattatcactagaaaagatttaataaatggtatttacgttttatatcccctatttatcttacccattttcattaaatttgcattcattttgctcgtttctccttttcatgcatttgatttttcaggtttaaaaccaaagaaggtaatagattaaataatggtattaagatcaaagtccattttttaaatgattnttaaaatccggttaatcctgttaaatgttttgaatcagntcagggatacgtaaacactaagggtttttcaagagttaattgacctcttgaaaatcgttcattatgttttttcccctaatggcggcgcatttcataccagctctgatccagtatcgcgcgatttaatccggattttgccctgacgtgccg

SEQ ID NO: 4711 - DNA, 388 bp, Photorhabdus luminescens
agatgttccccaaccagattctgttgcggcctgagtggcaacaaaatgggttgggatgatgtcaacacgacttagtagcttgttccagttaatttttttaggcgagctgctacagctcacgttgtagtttttacaaatttgttgcaggcgtttgataccctgtatagaccaaagcttgtcattttggtgttccagtagccatttccgttcctgcataatttgttgattgtgttgatcaatcacggggacaacaacatttaaaaacgctttcttacgtagggtgcccgaagggtattttcgcaaatctggcaaattgctttgcatgtcattgtgagaatactctatgcttttagctgtgctagttgaagcatgactaaaagcggaaaac

SEQ ID NO: 4712 - DNA, 772 bp, Photorhabdus luminescens
  misc_feature (23)..(23): n is a, c, g, or t
  misc_feature (514)..(514): n is a, c, g, or t
  misc_feature (573)..(573): n is a, c, g, or t
caagcttgtgctcctgagtagtngaattcacaagcctgaccaataacaattggacccgctcccaggatcaggatacttttaatatcagtacgttttgccattttattttctcctgattacttggtgttatgacgattatttttctgacaatactgctcaatgagttcaataaagtgatcaaataacgatgcagtctcatgtggaccggggctagcttctgggtgcccctggaaactgaatgcaggtttatcggtacgatgaatcccttgcaacgtgccgtcaaacagagatttatgagtaacgcgcaaatttgacggcagtgatttttcatccacagcaaagccgtggttttgtgcagtaatcatgacaacattacattcaagatctttcaccggatggttaccaccatgatggccgaatttcattttcatagtttcagcgccactggctaatgccaacaattggtgtccaaggcagataccaaagatcggaatctctgtctcaagcagggttntgactgcatcgattgcataaccacaaggtgccggatcttccggaccattggacaagaanataccatcccgaattcagttcagtacattttcccgccgatgtctgagcaggaacaactgtcaggcgggagccacgatcccacagcattcgcaagatattacgttttgcaccaaagtcataagcaacaacatgattagggcaaatctgctcttgcttatcttccggaatccccccgcagcttcacctccctgtaacacgg

SEQ ID NO: 4713 - DNA, 381 bp, Photorhabdus luminescens
tggtcaacgcaatgttgccagatgcagtacagagaggatagtttgaagcgcaattttttgctgtcaaatcatgtgggattacaggagtagggattaatgtctaataacctggcttatcactatttgccggaagaggtccataagtggccgggattaccactttcgttaagtggtgaagaagtgatgccgttggattaccgagcgggtgacagtggttggttgatatatggccgtggcctggataaacaacgtattagtaattttcaacatcggcttggcgctgctattgtcatcgtttcttcatggcgtattgatgattatcaggtagtacgtattgccggaaattgactgctcgtattaaacggctagctgatgagtgtc

SEQ ID NO: 4714 - DNA, 753 bp, Photorhabdus luminescens
aagctttatatcaacagttaatagatgctctcggtcaataagcaacaataaggcttgactgggagtagtgctaaatacttctcttgtttttagtgcagaaaaattaaacttataatcttagatttacaatatgtatgagctcacacaaaacccatttgataaagacaaactatcttttttgctgtatttaatgcgttgaaaataagtttataccatgtgtaaaacatagcgttaaaaagagtatttaaaatatgatttttccaaaaaagtatcctctcagcacgataaaaaggctcatctccggctggaaagaatgtagtttcgaacgttaccaacaagcgtattctctctatggtggtggaatatctactcatccagatattgtacgttttttaaatgaaaaatttggcaatagttttatcttttacgtcaaagaaaatccacaaattagataacggtatcgaaggggcatactttacatgtaaagatcattctcttggcagaagtcccccaaaggactactatgttttcactacgaagaaattctttttcctattgccagacattttaaactattttcctatggagtcaaaacctatgacctctgccaaaaatacttgtcccattttttagggcgataaacaagcaacatactcctgcaaagaagatttttttataaacaagcagaatctgagaatgaattatatttcagcgtccagcggcgtaacatcgattcgtaatggcctcgcaaaa

SEQ ID NO: 4715 - DNA, 423 bp, Photorhabdus luminescens
cgtggatatctttaccaatggctacaccgcatgggttagcgtgcttaacaataacgcatgcaggctccacgaattccttaacacattccagcgctgcttttgtatcagcagtgccattataggacagagccttaccttgtaactgagttgcagttgccatggatgactcagaaagatcctcttctatatagaatgccccatcttgtttgtttatttcaccggaacgcatatcctgcttcttaatgaaattcaaattcaaagtacgagggaaacgttctgatggttgattcatatcaacatgataaggaggaaccaacttgccaaaatagttagcactcatgctgtcatcaccccgtgatgagttcaaaaagcctaatcggctaatcgaatcaggaaggatgtgctaattactccatgacccgc

SEQ ID NO: 4716 - DNA, 769 bp, Photorhabdus luminescens
aagcttcggctttactaataaaataacgcgaaaccaaaagccctaacgggagagtgaccaacgtgaccataaacagctcaatcgatttgaatgccagaaaacctaaacatgcaatcactgtaatcacatgataaataaactgcggcatggtagaaatagctctggaaatatcactcacatcagatgttaaactggcctggactttatgcccgccaatccgttccaaaatagcataaggggtattcaagatacgtttcactaaggtactacgaacttcaaaaataattttgacgcttaactttgtcattaagtaattagcaaaagaactcacaacaaacaagcaggcaagcccgatgaagaatttaactgtccatgatactaagtcagcgctaatctgttctaatgcatcatcggtaatcaaggaaattaaccaaatactaaagaaagcactaaaagcaccaacaatactattaaaaataatttttaaccgattggctttaaccaaatcagagatcatccattttaacctccaaagtaaattttattatcgcccgatttaaacacccttcctttgccacagagtgatattccatccccccataaaacctcggctaattattttccgcggttaccaaaaacagtgttgataaatagcatcatcacccattaatttgtaaatcaacactttataacctttatcatatacatcgatttttaacccactgaaaaagtgcgttaaggtgatcacttaccaaacttgcaatgtatt

SEQ ID NO: 4717 - DNA, 392 bp, Photorhabdus luminescens
  misc_feature (98)..(98): n is a, c, g, or t
tatacggattatcgataaacaaagcccgttaaataatcctgcggaccgagaccactgtattcagtacatggtggcgattcctttaatctttggtcgtnttactgcggcggattatgaagatagcgttgcggcagatcctcgcattgatgcactgcgggaaaagatagtatgtattgaagatctggattttacccgtgattatcacgatccggaaaaacgttctattgctaacgcattaactgttacgtttacagatggcagccagctcgatgaagtcaaagttgaattccccatcggccatgctcgtcgccgtaaggaaggcattccattattgctgaaaaaatttacaaccaacctggcacgttcagtttcctgaaacgcatcagaggaga

SEQ ID NO: 4718 - DNA, 762 bp, Photorhabdus luminescens
  misc_feature (304)..(304): n is a, c, g, or t
aagcttgagcaccatcctgccaaccaaaaagctgtcgccacaacgtggcccaatcaatcagtgaataaaacgccgcctcagtcgggatcttgccaggggcgaagtgggtaccaagctgactgaccgtttcatctgttatctctttcaccatcgtcttttcctcatttagctagtcgtaaaggtaaactttcccttcgccacttttccagccactggcaccaatcgccaatgtattggcgtcaccgctaaaacaaacaccggcaccaaatttatggtttgattccccatccagctccagtaattngctctgcataatccattgttcattctgatagctaaaccaccataccgcaccggtttgcacacctgtgtcatttttaccaacaggtgttgacaccaccagcatctggccgtcactactcaaagagagttcgctgccaaacctttccccggcagtcacccgttctcttaatatccctataacttgccataccttacggtgacgctggtacagatagaccgcaccaatattggttcttctcttcccggcaccccaccgccagaatatggccgctattcgttacgctgagacctggcccaaagtcccctttactgatggttaaggcgaagttagcgaattgagtggcagtgcggttgcagtattcccgtgcgatgaatatcgttatttaccttaccttaccccccgttgccgcactggcaagttaaacctcgtcctaagcttagttggcgccaaattacgca

SEQ ID NO: 4719 - DNA, 816 bp, Photorhabdus luminescens
  misc_feature (659)..(659): n is a, c, g, or t
gcgtgatgacttacaacaactcatcagagcggcggcagaactggaatgtgactggaataaggtactgggtgaccgcataaacctagctgacagacatcttttacagcactgggtattacagccgctatttgactggtggctccgtttgttggagccagagatagacttctggttcactgaatttgatcagctacaaatccaagaacggcaactgcatgctaaagcgcatttttggcagcaagccgaaagcgtctcgtctcaatgccgggaacaacaacataaagaggttacatctttgcaaacagcgcttaatcaacgcaagcaactattagaaaaacggctgttgacaacggaaactcaggcgcgcgaagcatggcccaactggtttactgggctagatgccctccaaactggcggcgacctaaccgcttttatgccggttcccgaagcactgtcatcctgttgggcgtggttgactactttagagcatgacaccgaggcggctactcacttgcaaaaatggctctgtgcccgtttcctgtgcctgccacaggacaattttcactggcaatcgacgacctaattattagaggaaacatgcaaactctactcaatcattttggccagtcgtttaggccagaagccttttgtttccgatngacaagggcattaccatttgcacattgataactacaacctgttttttcgccacagggaactgaacttgtgttatccagcccgcttagctggcgccctaacccaaagatccgttaggcgctgaatttattgaaacactattggcacaagatacgcgct

SEQ ID NO: 4720 - DNA, 444 bp, Photorhabdus luminescens
  misc_feature (13)..(13): n is a, c, g, or t
  misc_feature (33)..(33): n is a, c, g, or t
  misc_feature (78)..(78): n is a, c, g, or t
gctcggctacgtntacctcgcccaaagggcgtngcgaccacaaaattgcttgcccatccaaatcaccttgaacatganccggccaatgtagccctttttagacggggggcatgactcgacccccgaccctaattcgtagaacaactgtaaccatttgtcgtgacaacagccaatcaatacttgaaaacgcccggcaactcttatagttgtgataccatcctcagtaggcgatgcaagtactccgagttcagagaacagggctcccataaatttgtgatagtcttgttccatctgcgcttaggctcatagttgaagacttggaaattgtcgaccacaaccgatatgccctcgttgtacatagattacggaccagaaactctgaaaagaaccaaaaaaagtatgactgtttataacacaaaaccggatacccgccaatattaccgc

SEQ ID NO: 4721 - DNA, 741 bp, Photorhabdus luminescens
  misc_feature (7)..(7): n is a, c, g, or t
aagcttntttagggttagcatgtgcctcattcggtgcgccattaatggcccatgggtataataatgttgttgaaaatggatattatctactgtacagagaaaatattaatggtggtgtcagagaaggatataggtatgttgctaataaaattggtttaagtgataaagatgcagatattacttatgcaactgttgatttagtgctttcaggttatggcatttttagaaaagttttgaagccaagagagaaatcttggagtttatttagaaatattaatagtgattttatcagaggatggagagaaatgggagttgtgagcttaactacagaaggtattgttgatgtttctacagttttgagtatttatcagctagaaaaggaaaaataatgatggattatattgatgttacaatttccactcaatctacttggcaggatattcctctgtactattctttatcattgattggctttgcttttcttttttttatgaaaattctcatagaaaaaaaaagaagttatataccctcttgttttggtttcttataataagaatggtgggttcaccccattgttattgtaaataagatgggtatcattgaattatatcaatggctataaattaaatagtgaaataattaaaggggaagtgggaattttttggtaatttgcatgcctgttcccacaaatatcgggataaataaaaataacgggtgaaaataactataatggtaaagaga

SEQ ID NO: 4722 - DNA, 385 bp, Photorhabdus luminescens
  misc_feature (121)..(121): n is a, c, g, or t
  misc_feature (203)..(203): n is a, c, g, or t
tcaggtggcctgttctgagtggaacgatatccgtgacgagatcggtcataacgttggtgtttatgataacccggcggacttaaccgctaaatcatggaccgtgatgcgcttctcagaagtngaagagaacggcaaactggaatggctgattcgtaaagatggttgtatgcactgcgctgatccgggctgcttgaaagcttgtncagccgaaggggcgattatccagtatgcaaatgggattgttgattttcagtctgaacactgtatcggctgtggctactgtatcgcgggttgtccgttcaatgtgccacggatcaacaaagaagattaccgggtatataagtgcactctgtgtgttgaccgcgttaacggcggtcaggaacct

SEQ ID NO: 4723 - DNA, 774 bp, Photorhabdus luminescens
aagcttcatgtccacgggcatagccataggtggtatttgtataatattttttctggcttaatagtggaatccgttttttgacatcaagccagctatcgggatttcctttctgtgatgccgtcagtttgcgggcatctaacatatgtccataacccatattgtaagctgccagtgcaaaccagatgcgctcatctttagggatattttcaggtagtcgtttcattagattttgcagatagatcgcccctcctttaatactctcctccggatcaaggcgatcaacgacgcctaaccctttagccgtctggttggttaacatcatcaggccacgcacacccgtgggtgagattgcctgtgggtcccaatgagattcttgccaggcaatggcagcgagcagtttccaactgatatcaccggaatatttttcaaatagtggctgataggtaggcagaatattatcgatggcactgagaaaagagagtgtatcgaaataatcaaatgagtggacgtgaccaaagtatttctcctccaaccgtggcatgacatttttttccgttagctggctgaaaaaatccagcatggcagcataaaggctgtagtcgtcaatgcgttttaaataccatgtcagcgggttatcttcactcacatcaaaagcgacggccagattagggtgagtacgtttgtgcaacgcgaccataatcgagtcacctaacgtataattccagttaccttctgatacctgttccagaagttcgcgagtgttatattgccgag

SEQ ID NO: 4724 - DNA, 393 bp, Photorhabdus luminescens
caatgagcggtgaaggatattcttccggttggctaagcgttagcttactaccacttggaacatcaatttcaaccgaaattaattcacttaatgaacccataaaaatctccaatcagttttttagataaaataaatttatttcgccttcgccaacaataaattagcaattgaacgaactccataacccgttgccccagcggaccaatgttctaccgcagatttacgataagttgccgagcaatcaatgtgaatccaacctttttggtattcttccacaaagtgagacaggaaagccgccgcggtactggcacccgcagtatgcggtgacgcagcaacgttgttcaaatcagcaaaattcgagggcagttggctacgatggaattcagctaatgg

SEQ ID NO: 4725 - DNA, 769 bp, Photorhabdus luminescens
  misc_feature (630)..(630): n is a, c, g, or t
  misc_feature (661)..(661): n is a, c, g, or t
aagctttaggacaatctgaacgctcaacaacatcagaccaagggagtgatgcattaatgccatacttttccacagtcagaacatcactatcgggataaatatcgctgaatgtattattcacaaacttattattagcgatactattacaatcagagccctgtatcagcaccaatagattcttaccacctctttgcttaagatagtaagttatttcactaccatcatgacggaaaaactgtttatgtgcatttgtatttgagtaagcaaaacctatataacatgaaaaaagcagagcaaatgtcaaaattctctgtcgtaaattaaaataatatgctttcattaatctctcctttaattgacatatacaaagaccacaaattgacgatattgttcctgtcagaaaaaattttaaaatttaaaaacaaggttcagagttttttatccaaagtgctaactaaaacacccatacctttggagagaagaaatgcaaaccactttatccacagaaattacattacccgataattatcatacccacgattttttcgctcttcatcaaagggataaacaaaatatcgctgaaattgtgggacagaataaagttcaaaaagggatgatgtgggatgacanacctgcggattaaccatagcgattaatgcanaaaccgcacatatacaacttaagattgatggtgacacaacaggccctgatgagcgcttatctactttagcatcacatatgccagggcttctacagcctgttcatcttt

SEQ ID NO: 4726 - DNA, 385 bp, Photorhabdus luminescens
tgatgcgtgatattgcctggggatttttttatggcactgttgcgtttgatgatgtactgggcacgactaatcattacggtaacgtcgatttgtacatggggtcattccataaagaatggacccgtgctggccgtgattataaagagaatttcaaatctgacgagctgatggcgattttcaaagccatgatttctgactggaccaacaccgggtttgatcccttcgctgcaccgcaggaaacgggagtggcgtggggacgcaaaaatggcaatgaagatcgtttaatcgggcgtaaacgtgaagtggctaaacgcatggtgggcattccgggtgatgcgccgctgcgttcagatgataatggtcatccggttaaccgggctttcat

SEQ ID NO: 4727 - DNA, 571 bp, Photorhabdus luminescens
  misc_feature (516)..(516): n is a, c, g, or t
  misc_feature (537)..(537): n is a, c, g, or t
tagctggcaggccagcgcatactcaacagtgaacagcgcaggttgggtataacgtgtagcatttaaccggctgatagcattgtcgcgctccgattgcggataaatcaactgcctgatatccagtttgatgtgtggctgtagcagttcggcacagcgatcaaattgctggcggaatacaccatcacgcagatagagcgattgccccatttcaatagactgactgccttgtcccggaaacataaaaatcaccgcacgaggctgttgtttgcgattaatcgtctgcggtgatagttggcgtagttgattgattaattgctcccgatcttttcccacaacaaaagcacgctcactgaaagcgctgcgtccttgttgcaaagttccggcaatatccgctaatagctcattaccggtagtcaatgctacctgccagcgttccccttgctgaagcaaccgttgcggcgttttcgctgaaattggcagcagatgccagcgctcgtcatctaatataccggcatnttgctggcgcggagcttcttncagaaaaaggtgcgcattactgccggcaatgccg

SEQ ID NO: 4728 - DNA, 762 bp, Photorhabdus luminescens
  misc_feature (762)..(762): n is a, c, g, or t
atcttttacgtcgtaaaatcgagatatccaggatagggtttcttagccaaaaaccctatccctatggaccctctaatatctggctccatactagtaccactatttctaaaagctactgtcttctcttaaggagtaaataaatactcacagtaaggaacaataggcttggtaatagtgccgccaaaaccgctggcacgctgtacaccaagctcagtggaccaaagatctcattaagtacataaaataggaagccaaagctaatccctgttactatcctcactcccatcggcacactgcgcagtggtccgaagataaaagagagtgccatcaacatcatcactgcaactgaaagcggcgcaaatatttttttccacatattcagttgataacggcctgattcctgttcactctgcttaaggtatttgatgtactgatataagccactgatggaaagcgcttcaggctcaagtgcgactacattcaactgttctggcgtcaggagaattttccagtcagcagaaatacgttgtgatccggtgatttttttgctgtctgtcagatcagattcttccacctgagaaagcttccataggtcgttatcctaatcataaaccgcactggctgcatattttacagagagtagttttttatcatcattaaaatgatagatattgacgcccttaatctcggtatcactcacaatccgttggatgtagataaaatccgcccccatctatcgcccacatacctttatttggtgan

SEQ ID NO: 4729 - DNA, 506 bp, Photorhabdus luminescens
  misc_feature (1)..(1): n is a, c, g, or t
ngtgcgcatgctgctgatatgacgtgttctattgtgagcggataacaatttcacacatgaaacagctatgaccatgattacgccaagctatttaggtgacactatagaatactcaagctttaggctttgagttagtcggcttggagtttattcgtgcacgtgtttctacactgcggatttatattgatagtgagaatggtatcactgttgatgattgtgctgatgttagccaccaggtcagtgcggtattggatgtcgaagatcctatctcagtgctttataacctggaaatttcttcacctggcttagaacgcccattgttcacgactgaacattaccagcgttttattggtgaggaagtcagtctggttttacgtatagcaatgcaaaaccgtcggaaatggctgggcattattaaaactgtcgacggcgaaatgatcacggttaccgtggatggaaaagatgaagtgttcgcactgagcaacatccagaaagcgaacctggta

SEQ ID NO: 4730 - DNA, 757 bp, Photorhabdus luminescens
aagcttgtgcaaaatggttggctgagcaaacaccaattataggtatcggggtggagactgttggaaccgacgcgggtcaagccggaaaatttgaacaaccttaccccgtacactggtactttcacggggcgggaaaatatggcctgactcagttgaagaacctagcaaagttaccgccaacaggtgcagttatcatgatagcgccgcttcccatcgttggtggttcaggaagcccttgcagggtgttggcacttgttgaataacacaaagttaatttgcgaagagtttttaaggaagagtcgatgaattcaaagtactgcttgttactaggaacagagaaaaacagatttcgtgcattggttgccacggctagagcaaccaacatgaaaatagcgatcatggccccaagtggttatgttaatggaaaccgttacgctgatctagtgattgacggtaacccagaaaacattgaacaagctctggctgcagtacagacctttgccgagcgagaaggaatgcaaccgggcgcagttgttccattgacagaaatgacgatagccccgggggctcgtatcgctcagtactataatttaaattatttgtctgaaaagccctgacattaacccgcacaaatttaaatgcgtaaggctgacatgcaggtgggttggacgttccgaagtttcacgttttaatcccttgagcagctagcgacccttgctgaagatttttcttttccagcaattgtaaagcccaccag

SEQ ID NO: 4731 - DNA, 389 bp, Photorhabdus luminescens
aaccgtttttgtatcattggcagcaataagtagttcaatattttggagtcgctttcggctttgcaagaaatggaaattaagaaaatatctcgatggtgtgtcgatatgtacatttgttgcgagtacatattgaaaccccatcgatgctattatgaaattttaccgcaaaaatatggcacattaccctttttctgttttcagaataaaaaaataaagccggttacccggctttatttccttatctattccgttgcttgatagaataggtttatggaatgactataacactaggatctgttaacgaacattcgatgtttgatactagggtgacagcaataatatttactgtcgagtttcttgatttatcaaacaaagaaacctttatcacc

SEQ ID NO: 4732 - DNA, 777 bp, Photorhabdus luminescens
  misc_feature (777)..(777): n is a, c, g, or t
aagcttcattgttaggaattaataactctatctcgccagagttatttaatattctgaccgaagaaattaccgaggctaatgcagaggatgtttacaaaaagaattttggcgatattgatcctacctggctggcaatgccagaatatctgaaaagttattataatcttagtgatgaagagctcagccaatttattcgaaaatatccaaacaatgaactaaatactcagaaaatacatttattaaaaatcaataaaattattttattatcacgatctgtaaacctgccatttgtaaaattagatgaaatcattccagaacagagtattaatccatcggtattaggaaaaatctttctagttaaatactatatgcagaaatacaacattgatactgaaactgccttaatactatgtaataattccatttcacaatattcctatcgtaatcaacctagccaatttgatcgcctatttaataccccaccactcaacgggcaatgtttcgttaccgaagacaccaatattgacttaaatctgaacagtaccgataccgataactggcacaaaacagtacttaaacgtgcttttaatgtcgatgatatttctctttatcgattgctccatattgctaatcatgaaaataaagatggtaaaattgctaataatataaaaaatctttccaatctctatatgactaaactactggcagatattcaccaattaacgattgatgaactgtatttactcctgatgactatcggtgaagataagagagatn

SEQ ID NO: 4733 - DNA, 383 bp, Photorhabdus luminescens
tattttgcaagagtagatatacagtaaaagtgtatatccaaggaggtaatatcatgcaagtagcaaaatggggtaacagccttgccatacgtctgccagctagcttagttgaaattctggaattgcgtgaaggtgatgatattgagattgtagtggatgatccgcgtaccttcgcagtatgcaagaagcctggatctgaggtgttgttggagcgtcttcgaacattccgcggtaagttgccgacagatttcaagttcagtagagatgaagcgaatggtaggggttaagtcttgcggtttcatcgacatcagtgtgcaggtactcaatgaagtggcgcacgtgtgtgtgcgtaaacttaagatgagttgggaagagatagcgga

SEQ ID NO: 4734 - DNA, 791 bp, Photorhabdus luminescens
  misc_feature (4)..(4): n is a, c, g, or t
  misc_feature (636)..(636): n is a, c, g, or t
aagncttgagctgctggcatatttaactccttaaatataaaaagttagttatgttggcaaaaaaacgatatttcaaaggactcttttattataataagaatttcatttattataatttatttttatgttttatatgtgtttatatttaacatactgttttcaaatgaaatttttcacatgagaactcttagctcgttgattcctcttttgactgtgatcatcagtatatttgtcttacgtgttgtccccactgttggccttgctcttggaaccgttctatctctgtctggtttaatctgattgatcagcgccggtgatcccatatcattattgcaacacggtttagtactacagccgtagataccagaaagttgcattttctttgatgctcacaattctgagaaaccgcatgaattaagcttttctatgagtgtcttttctgttaagagaaataagtacggctgtcgtattaggccacggcgaattgatgatgttacttgcttccatctcctacgcactctttggcgtattaaccaaacataaatccataggatttgtatataataaatcagacactattagactaaacaccactcatttttatcttaatgcgactatctatatgaatataattcntcccgtttttagcagtcctgatttggtcaattaatggcggagtaagtaaagcctccgctacagctattgatccggcgggaatttctttttatcgctgggtcctaagccttctcacattaaccccctttgttggactctcgggcattcggcgatgg

SEQ ID NO: 4735 - DNA, 396 bp, Photorhabdus luminescens
  misc_feature (322)..(322): n is a, c, g, or t
actatcaggaactttgtctggccgccaatcgccgggtaatccgtccctgttgtaacacgttgcatgtcagcctgttttttgatggcaccggcaataatttatataacgacctttatcaggctgttcctaaccatccgaccaatgttgtccgtcttttccaggcaaccattggggcgggttatgccggaggggcatcaggtaagccgttactggataatattgagagcatcggaagaaagtactttaagtattatattcccggggtgggaacccctttcccggaaattaatgagctggattacagcaaattggggctggcggntgctagcgggggagaagaccggatcaattgggcattactgcggttgattgatgtattaaagcgcgtattggtaa

SEQ ID NO: 4736 - DNA, 788 bp, Photorhabdus luminescens
aagcttgtagtaagagatgctgctatcgaagacactatctcaatacttgaatctcccccaggtagaaaaccacaaagagaactaattgaactatctgatttttataatgaaaaatcgaaggaagagaaagagataatcaataaaataataagaatagtagctgataatacattgttcggtattctttgtgttattgatggtgtacgtgcaatagaaaatgatgaaaataaaggtgagctaatattgacctataaaaaggaaagtatagttaacttaaataaaaatagtaatctgcacgatatatataatgctagttaattaataaagccggaagatccccgagatcttccggctttattatgatctaccttggtgcatatccacagtaaaccaacgcagattggagcttagagatcgcatctttgatctgatacgcttcctcgtcattcacggcacaggcacgtatctccgccccgtccgcccccgcgggcgggggctccccgctgaaaagtttcacctgcgggcctggcccgcccgcacccggccaacccgcgtaaggggcgcaagcaagctgcaccgccgccacgggttcctgataaaaccccggttctggcagaaaaagccggggcgaatcccgggactgacattcggggaaaaagtgagcttaaatcgggaaagtgcacattcggggttttgggttcgcggcggtgaggggagaaggaccaagtggctcttaacaggttgtattaaagaaaaattccggctaaaagatgggcttgtcagggcaa

SEQ ID NO: 4737 - DNA, 393 bp, Photorhabdus luminescens
cttcacataagccacagaaaatacaacgtgagaagttaatgcggaaaaattctggataccaacgaccatcttcatgttccgccttttgcagtgagatacatcccaccgggcaaacagccgcacacaggttacaggcaacacaacgctcttcaccgtccggatcgcgcgtcaacacaatacggccacggtaacggggtggcagataaaccggttcctctggatacatttgggtttcgcgcttatgaaaggcatgcaagccaatcatccaaatactgcgtacctgggtggcaaaaccaaccactaactctttcaatgtcatggttcattccccccttattgagcgttgtacaaaatcactgccgcagtcgccagcaggttaagtaaggtcagcgg

SEQ ID NO: 4738 - DNA, 808 bp, Photorhabdus luminescens
  misc_feature (194)..(194): n is a, c, g, or t
aagcttgtaattgataaagatttgtacaggtttggccagtgtcccgcccattctctcgaaaagttcactcactgtcattcattacactatgtggtaaattggttataaatcgcaagttaggacgatcgtaatagaaattccctgtttccaagtcatcagcaatcaatcagttatgatacctatcgtgcaatatntgtttttgtagttcaggtggcatagaagggtgattaaggtcgataagtccgaggggggacatttccactaaaaagaagtttaagtttagaatccgcaattctttattgattggatatgattatagtttccatgaaacactttccagaaatactgtaatatgaattatcgcatctggttcttattgaatttaagcctctcagctgttatactaatcggtatttctggctcacttctccgggaatgtgacaaaaatatttttttctcggctatcaaaaaacacttgaaaattactactgcaaacgagtatggtttaaatttcaaacatttcaacgcctggcaaattaacaacgaccaatcaacccgtgtgtctatgacctcccctggggataaaccccttatataaacctggtaccggttttatagcccccgcgaaatcccttattgtatcttgacgaaaattaaacaaccctgcgaattaacacaattcaacggggtgcgaaagaaatgcgcgtttatgcccggaagcttaatgattactcttgctagtcgacggatggaatttcagaatgactagccgccgtttggtgcgataagaaacactgcgaaggaatga

SEQ ID NO: 4739 - DNA, 790 bp, Photorhabdus luminescens
  misc_feature (456)..(456): n is a, c, g, or t
aagcttcaactggtgctgaaatcatcgctgttaatttttgctctaatgtggacaagcccacccccaagacataaaaaaagggctaattagcccagtagttctgttgtcaaataacaaaaaaccccgaaattcggggctttatgcaactggaccctatttgctgccagtggcttcaaccactcacttcatgcccctttaaatcagaatcaatatttcaaatattgctgaattatttcgttcaaaaaggtgcatctcaatttaagaagtggttgcgggagccggatttgaaccgacgaccttcgggttatgagcccgacgagctaccatgctgctccatcccgcgttcgaaaacgtggcaaatattacgccgatagctgcaaaaacgcaagctatccgaataatggtaccgaggacgggacttgaacccgtaagccctagtgtgggcactaccacctnaaggtagcgtgtctaccaatttcaccacctcggcactacatgaagctatcactgattaaacaggctcatcttaattctttcctgtgacgactactgaggaatatcactaatttggtgctgctggtgcccgaagaatcctcgttgacttctcgactttagcaggctcgtcaatgttttcccacttactgctcgccccagtttggttactggttatatcgcccaccacccatctaatattgaaaacagagtggcgataagtgctgtcattccaatcattaaagttccaaagcccgaataaccgtacagctgggtcacgctcccgtccaaagaagag

SEQ ID NO: 4740 - DNA, 447 bp, Photorhabdus luminescens
  misc_feature (37)..(37): n is a, c, g, or t
  misc_feature (58)..(58): n is a, c, g, or t
ggaaatttgggttgaccatttagtcaaaggatttagngatcgaatgatattgccagangcaaagggaagagcatcttcgatcaatttactggcattgttagacggcgtcaccaaagataaatccgaccaaacagaaattaatgaagtgttattatcatctgttgataatattccgagtcaattatcttacgaaactatggcagtattttttaatttatataagaattcatcggtttatgaaacactaaaaagcaataccgattgctgcggttatgtttatcttcatattaacgatgagcacttttcttgtaattcctgatgactgaaattaatgacgcatggagggctcctttgtctatttttatcctgacatatccaagtggacagagcctaatttgggctcttattggtatatgatgccttttatagcttttgcttctcaacccg

SEQ ID NO: 4741 - DNA, 773 bp, Photorhabdus luminescens
  misc_feature (531)..(531): n is a, c, g, or t
aagcttacagcttcacggatcttgtggccgagaaaatgcgttcagtgatccagcagattgtccgtaaccgttcacgtcgtcaggacatctacgacctcaatctgcttttagacagcatccaacctgaaaacaaggacaaattggctatactgaccacactactggaaaaatccaccggtcgcttggaagacggaatggtcaaccccgaaaccctgggcagagtggatatacgtgaacgatcctcacgggaatatgaactcctgaaagacgaggtcgaaggggaacttatggactttgataccgcctatacacgtattgtggatttctataaatccctgccttgggacttagtaacaggttggcagaatgttgcaaaatagcctgtatctgtgtcatcaggggcaacgagacgagcagctggatagatttttctttatcaacactggtgtatgttcggtctccgtgatggcagatggattcagccactgccatgccagtccgcattatgttgactggctgggtgaacaactntatgcactggaaaataccggaagttgctgcaacgagctgtgcggagaagtccttcggatcctgagcttgaatgactgttatccgggaaaggctagtattgcggttatcgtgtctgatcaagaaaaataccgctatgccactctgggtgatacacggatttactggccctcacacagctttagaaccaccgaccattcactggcccagcgctgtattgaccgtagaaactgcccagcaaaaaa

SEQ ID NO: 4742 - DNA, 396 bp, Photorhabdus luminescens
  misc_feature (204)..(205): n is a, c, g, or t
  misc_feature (366)..(366): n is a, c, g, or t
ttgacgcagtaattcggtatttacattatttgtcatgatttttttctcctaaagacacttgtgtgaggggttttcgccggtagaaagtggctagctgctggcataaccaactcaatccagcacaaacagtcattacaagggccatagcaaaaggggtttcatcttgtagtaaagagacggcaacactggcgaatgccgccatannaaattgtgcggaaatagcgagcgcactggcgctgccggcaagttgaccgcgatgttgaagtaataaagagaggctgttagtaccaatggcattaaccagcgagataaacagtacgaccaaaatgacgatcaccgtcagactttgctgataaaagataaccnataagatgccgaacagttattgagcactgg

SEQ ID NO: 4743 - DNA, 767 bp, Photorhabdus luminescens
  misc_feature (635)..(635): n is a, c, g, or t
cattacaagcaacgatgctatgaagttctgcgaatgtggctttggtcaattcaaattgaccggttttcactaaaactagtaagcgcctggcactctctgcaagatttaagatctgttgctgatcagaaaccttcctaccgccgacggtgacaccgtccaacaatgttttcacttcggggaaagtaaagggattgccttcaagtacaccagcatcccaaacaaattctggcagcatccgatgaaagcggaagcatacccgctcaatagaatgaataggaacaataagaggagccgcagaccggtcccaacgaaaccccaatgcgttgaaaagcttcatcgttgctaatcctttttactatttcgaatgcgctaaattataagtaaaacacaataaaagaccacctccccaggctatcccgccagaaacgctctcacttgacgagcggggagcaaatgtcgcggaagcttattcaacttcgtcacgtgtgactatgacggaaattcttgatcgtcacccatccccggtcgtgatcgcatttagtacgaataataattactgaaagtttttctcttgtataaataagattccaaatagcgccacatcttacatcactcataatttcgcctatacaatnaggttagtaattcgcgcgtggcagaatcatgaaacgttatttatattaatatgttagtgatgaattagatataattctttaatattggttaatttccggtaaattgaggaagtaaataaatataaaaccctt

SEQ ID NO: 4744 - DNA, 389 bp, Photorhabdus luminescens
cgtcctccattaacacctgaacaaattaataaaaacagtcagacttatataaatcagcttgcaaaagttataaatatcgaaaatattgaaataaggaaaaactcagaatggtttaacaatatgccattcagtaatgtcataaagttaatctctaaaatcactcttgcacaaatcatgcaccgagatgattttaaaacccgatttgaatcaaaagcaccagtccatttgcatgagattatttaccctattctccaaggatatgactcagttatgattgatgctgatatcgagcttggcggaacagatcagttatttaataacttggtagggagaacacttcaagaagcctatgagaaaaaagggcaaatagtaataacaatgccattatt

SEQ ID NO: 4745 - DNA, 770 bp, Photorhabdus luminescens
aagcttttatttagcttgccattcatatcaggcactaatattaaattaatgacctacaaatcaatcctggcaaatcctatatcctattactcttgaattggagagggatttgcaatacttttcagtgaatcaggaataattttactgagatacatatcactaatttttggcaaatttttaacatagagatcatatggcatccagaatgacttcccctcaaatcgattattctggaatatatcattctgcacgtctgctggaatattttcccattcagcagcatcaggcgaatatggacctttatatttaacaacattccacggattatgcagtcgtactaacttaatatcattccattgctgagcatctaatattaaataagcatgacctgatactaaatccgttgatgaaccggttccttgataagtcacatgatgttttattttgaagatatcgataaatttctcatcccaaatacgatcctgattaccctgattaatactggtatttgctgtcgattctataccaaaatagatttcattaccgccgcctaaattctcatagctcccatgcaatttcgcaaatgcttttttcatcaggtaataccaaaactcatttttatcttccatagcagacaaactcactcgtggcagatcatcgccaatcaataaataaccaaccgtccattgattgatgattctggatcaataaatgcccgttgggttataaaccgcgcgtagatagcaaacaatacaaatatgcccttcaga

SEQ ID NO: 4746 - DNA, 388 bp, Photorhabdus luminescens
ataggcatgaaaggtgtctaaatcatggcgtaatgtccccacgacgcgggagaccagatgcataacaaaagagtagcgatcaacttttgtcagatccgcgacatagcgactgcccggttcacaaatgcgggccaggtcattacgcgccaaatcaactaacattaagtgctcagctagctccttatgatctgttcgcatttccagttcggtccggctatcaagatccgcatccagctcgccggccgcattgcgcccacgggggcgggtgccggcgattgggtagatttcaatttggcgattggatgcatcatatttaagcgcgctttcaggagacgcgccaaacagacagaaatctttgtcctgcatgaaaaacatgtagggacttgga

SEQ ID NO: 4747 - DNA, 621 bp, Photorhabdus luminescens
  misc_feature (93)..(93): n is a, c, g, or t
  misc_feature (159)..(159): n is a, c, g, or t
  misc_feature (168)..(168): n is a, c, g, or t
atggatcagaatttctatcaggctcagcgcagcatcacgtcctgtgacgatacgttcaatactggtcgagcaaattagctcattatggtcagntaagacttcagcttctgtttgcatgtttttgtccgtataaaagcaaacgcgcctgccgggagtggnaggcgcatnatgtagtgagtaaataaggaagaaagatcgggaacgtactttgggaagacggttcgcaagattcagtgagctgaaggatgatggctttgtcgcaaaaggccggttgctcgccttgcccgtaaaatatctccagcccgaagatcaggttgattgttcctgacagccgaacctcctgaggtctataccaaccagtttgtacttttctaccattaactaactgaatcctcgccctgcccccccactgttcacctgtcccctgattacatttccctcccctccccgcttctccttcatgttgctgcctcatgcctattcctcatacctcgccccgtcctatttctcctttttacgtggcctcactcgccttctcccctcgtcctcttttccatcctgttttcgtccgcccgcgacactgtcgtcccccctttgtcctgttcccttctcccccgtttt

SEQ ID NO: 4748 - DNA, 765 bp, Photorhabdus luminescens
  misc_feature (383)..(383): n is a, c, g, or t
  misc_feature (765)..(765): n is a, c, g, or t
atacgtgaagtcaacttaccattacaaaacaatctattaccaaaaaacctaagtatttcggctgaaaaaattaatgccatcaaaaccgaactaccttatctattgagggaaatctatcctgttggaaatcaattacctaatgcatcggcaatcaataaaatggccctagctattgaagaaatacctaacacaccgatgccaaaatactcttcgggtaatatccaaaaaacgatacaatacacatccatagagagtaaccgcgtaaatattccccctatcgggatcacaataacaggtaatgatctctttattaatcaagtcactcacgtactagatgaaataagtgaaatcccttccggaaatatcgttattcaagagcttgnaaaacagggtttaaatatacaaccaccaacgatggatgccattgtacgcgagaaaaatggtcaattttatgcccataatagcgccggtagcagtattgcctttgacccagagaatcacttgattggcacagaagaaaaacttgtcgaggagccttggcgttcccgtgagcctgctatcgctttatatcatgagatgctacatatctattataatcgttacccaacatggtttacttctatcgataataaaataattgatcaaaaagtcagtggcggtttttctttgctggaagaatcacgcattgtgggaacaaaatattacgccaatgataaaaatacgttatttgatttcagtaattctggctatttattagaaaacaan

SEQ ID NO: 4749 - DNA, 383 bp, Photorhabdus luminescens
ataggcatgaaaggtgtctaaatcatggcgtaatgtccccacgacgcgggagaccagatgcataacaaaagagtagcgatcaacttttgtcagatccgcgacatagcgactgcccggttcacaaatgcgggccaggtcattacgcgccaaatcaactaacattaagtgctcagctagctccttatgatctgttcgcatttccagttcggtccggctatcaagatccgcatccagctcgccggccgcattgcgcccacgggggcgggtgccggcgattgggtagatttcaatttggcgattggatgcatcatatttaagcgcgctttcaggagacgcgccaaacagacagaaatctttgtcctgcatgaaaaacatgtagggac

SEQ ID NO: 4750 - DNA, 759 bp, Photorhabdus luminescens
cgccgcttcccccaatgtggttcccgaacccataaaaggatcaagcacaacctttccggtatatttttggtattcgtaaaaatccttccattggccttcagtaagagcaccggaaacaatagaacggaatacgcttcctaaacgcttcgcccaccatttatgaatatggtagataggacggttaatttcctttctgtaactttcgatttccgcaattggatcaatctgctcgaaaggaaaatcattttcaattatatacttcatattattttgttaacactggcatagagacagacgtacgtatttttgctatacgtgctttgcagtcagcaaaaatatcttcaatcagaacaggttcaacagattaatcaggctttccattatcaatgatattgtacaaaaaattgttttcgtaaatgtcgtaccttgatacttcttctgtagccaaatgcgatatctgaaggttttcacaatcaaattttttcgctacaaaaacttttcttgtatgaaaacacttcaatttgtagtttagtggattagggtacgtatacattgcccgatgacgaacagaaccttcaccgtacggaccgtggttatacttggtttggttcgcaactttggctttcttataaagattaaaatcatagttgatgaaatcaccgtgcatcaaaatgaaagttacaatactgctattgtcattgctcaataatgcgtacatgtaataacaaggaatctcgaccattgcattgcccatcttta

SEQ ID NO: 4751 - DNA, 386 bp, Photorhabdus luminescens
atcatccggggggcggtttgcaggttatcgacaaccgtttggcggttaagactggcaatggcatcgcggtgaaaccggaggggcttgcgttaaggctacagcccaatgggggattgatgttggataaatctggggcgttgtcagtggatggtactgtagccgtttcggcacaagcttttaaattgcttcctgaggagacgcggaaacaaattgccaagttgttattgaatgctgagacagaaaacagatgacagagaatagatgacggtgactgcctaatacggcttttgaggacatattatgactgataaagaaatgagttctgttgactcattgaaagcgagttttaagtctggtgttccgcctatgcctgaagcattttctca

SEQ ID NO: 4752 - DNA, 760 bp, Photorhabdus luminescens
  misc_feature (40)..(40): n is a, c, g, or t
caagcttctatgacacaacgagctggtcgggcaggacggntagaagccggtgtgtgttggcatctattcagccaagaacaggcagaaagagcggtagagcatagtgagcccgaaattctgaatgctgatctcagtagcttatggctctccttattgcagtgggggtgtcatgatatttctcaattgcactggctagatataccacctgcggcggctctggcggtggctaagtcgctgttattacagttaggtgcaatcagtaacagtggtcagttaacgtccagaggcagtaaaatggcggaatccggtagtgatccgcgtctggcagcgatgttatgtgcggggttggaacaaggggccgatatgctggcaaccgccgctatgctgaccgcgattctggaggaaccgccccgtgatgggccagcggacatcacttattgggttgagcaacgacaagctcattggttacggcgggcaaagcagttagctagaaatatgggtgatcattttggtgagcccagcggtggatttgctgcaatgctattagcccaaggtttccctgacagaatagccaaaaatcgggataagggagggcgtttttcactgtcgaacggtctgggaacaatattgatgatgaagaaacgttatctggcgaatcgtggctgggggctccttaatattacaaacagtagaatcctgagcgcgttttggtggctggccttggatttgacgattgatcagacagccgattattagtaaa

SEQ ID NO: 4753 - DNA, 423 bp, Photorhabdus luminescens
cacaaccttcagcctgcataagagggcctgctacaccaacaaaacgggcattaggtactttagcttttaatgcacgaattaaacctgctccaaggatatcaccggaagtggctccggccattaatccactcctcaacggacgcagactatcaatagaatgaaatggtcgccaaaggagtatcctttatctacttaacggacgatgccgtttttataatttgttagataatggttgaacattcttacatgctgattattctcagccagctcagcaattatttgttgtgcttcttctaacgcctttccattactatccaaaattcccgtacgcctttctaattaccttcaaagaacctttatcaaaaccacggcctccaaagccttaaatcttaatgccaaaaggtgtttgtttacttccctgac

SEQ ID NO: 4754 - DNA, 775 bp, Photorhabdus luminescens
aagcttacccaataataagttacacgttggtgaacactcaaggttcagaaacttgccgaggttcacacgactcttgtccagcaaacctaccccttcgaatagcctatgccggcactatatgcaagtttttgggaaaaaaacattgctgtaacgtggggtcgcaagattatagagaagtcaaaaataaaaatcgacccccatttgaatatttaaaatcagttttccgtctgaaatagataagcgaactcaaacttaaggtaaatgaggtaatttgagatactcttcactttgcatctcttgcaaacgggataagcaacgctggtattcgaaaaccaacaacaccccttggtaaatctgctccatcggcaccgccgcattaattatcaattttacccggcgttcataaaattcatcaaccaatgccaagaaacgacgagcagcattttcattacccggcattatcgctggaacctggtataacaaaaccgtgtgataacgttttgataaaacaatgtaatccatctgactacgcgcatcttcacataagacgttaaatccaattgccaatacaccttcagcgttacgaattgcccggctccgccgatggttaatttccaatatagaagcttgctcaccgctattaccggccaaagataaaccttcgatccatcgctcgttattatcttcattcagcggtgggaataaagatgagctcgagtaacgtgccccaccgatatgaatacccgattcccatcctaacgtacaatttgtgtgg

SEQ ID NO: 4755 - DNA, 391 bp, Photorhabdus luminescens
taatatctctgtattttcgcttttaaatggtcatgacagatttggtaattgatggataactgagttaatcatctttaatgcttttatacccgtcatctttcaagttgcctctttgttggctgcactcgctcaccccggtcacatagttacctatgctcccggggattcactcccttgccgtcgcgatgcatcttgaaatccatagggtatatacctgtgctcattgaaactgcttgattttcgcccaaatgaagctcatggtatcagtcatgaaaatattcattaccgatgaacaaaaagccgaacttgaacacctccatcacacctgccgtgataagagagagtgtgatcgcatcaaagcggtcctgctggcctctgagggctggagttc

SEQ ID NO: 4756 - DNA, 773 bp, Photorhabdus luminescens
aagcttgctgaaggtagagtgtcttcttaatgatcagtactcaacttatggaataaaaattcaatttaaaaaaatcagtatccattaattatatactcattctacttttagatgctggtttcacatgcgatttattttaaataatataattatgaggttagaagcctgcatcttcacgcttaaatgatatagaaagaaagtaaaaatatttcttaatggaattaaacttatactgtagtgtaggaaatataaataaaatgaatgatatctataacttaataagaagagtatcgtataaagttggtaaaaataacattagtagaaaaaactttttgtttttggcatggaatttaatcattttactaagaaatggcaataaaatggagacttattcaaatgctaaatagagtcaatgatatattgcacatcattggtagtggagtaatgcattacaattggctatcttcattaggaactatttctgctactctctggtatcctgcatatgcagggagtggtaccgtaaaacgataccgaaatatattacatgcaaaatcagaagaaagtgcgatccccatgggaacaaattggccattaatagtaatttctcatggttctgggggtttttgttttgatcatcataccttggtgagtttatatcaacacaaagtttttgctgggttagccgtggatcatcaagatattcaggatgctcgctatcgctggatgaattcgacaaccagacctcaccgtttagagtatgcttgtgatga

SEQ ID NO: 4757 - DNA, 775 bp, Photorhabdus luminescens
aagcttcttaaggtttttcgcctaaactttatgccacgaactcccttgaatacttaacggcggccattcttggctttcagtgataggtgccgtagccgtaaggtccctagcttgctgtaacatccgctcgaccaagttggtcaacagctcagcatccagcctctccaaccattcacggctccagagcagagtctctccctcaccactacggctcagttgcaatgatggccaatcggccaatgtagccaacgaacaaggttcgacatcacctagtggaataaacaaagttaccaactcatcgcgttggcggatatgcaaactaaaagggccgagaggtagatcgagcccttccgcatgcagagattcttcggtctgcccaaggcgtcggcacagttccgataataaggcattaaacatggttactctttatggttgtcaaacacagattcagtcggcggccacaggttagcgatcggtggattactcggcgtgccttgcaacctaccacctatggtcgcagcccaaggatcgatgacgtgtgcttgcttaccccaagtttcgggtttgctgagttcactgttgggatcgcgaccgaccactacaaagcagtgggtctggctatgccccttggcaccacgatgagcgactacctcaatgcgctgctggttatcttgattgtgcttcatcagctcggctgccgcggagtaagcaaaagtcgtgcagcaaccaacttgtgcttgagcgacacaggcggcattagatttcagttggttaa

SEQ ID NO: 4758 - DNA, 383 bp, Photorhabdus luminescens
cttgttgctccagcaaacgcagcgccgaacgtataacttcactggcatttccataacggccactttcaatcatgtgctgtacgaaccggtcaagctgttcacccatgtagtagttcaaaccttaactgagcagcattacctcatttagaggtggctttttacgatgcaatagtaagtttgatttcttttattccacaaacgctagcatattttaaaattctctcaatgcttgccctatctgcgtttttttcaagtcttgaaattgtgggaggcttaactcccattctttcggctacttgtgcacttgttaaccccgcctgttctctccatgatctcatttcctcttgcagttgaatatgtaggtctaaagtctgttttgtttc

SEQ ID NO: 4759 - DNA, 776 bp, Photorhabdus luminescens
aagctttagtcagtttatttagccaacgtaaacctgttcgccgtgcttttatcattcaggttcatgataaaaatgtggatgaaaaccccaatttattaattggactggaaataaatggcaccgcagacgaaattgagcaactgatccatgaagcgggcactattgcttgtgaatacacatcggaagaagagccgattgacttctgtttagttgatgaaaaagagagtggcatcagccattatttgattcagcatactcagccattttaccagcgtaaattaggcagttggttacgtgaaagcattccggttatgaataagtgattatttagcgggtgataatatatacccgtcatcttgaaagataacgggtatagcagctttatctgtatctggtagtcaagctcaataacttttaccaggtttttaacttgaaaagccgaccagattctccttcgtcatgcagttgaagaacaatttctgtactgtcaaacactggcagctctttaggagatctagtaggaagatctgaatctattagtgtgataacagactgaatacctaattcaacgtaatcgcgtaaaatagccaataaattctctttctttctattatccaaagactcgaatacctcatcatgaaaggcaaaatgaggaaatctctcacctttatgaactcttagtacagctaaatcaaaagcgatacatagcagctttctataaggtatgtctaaatctgcacttcgtgcgttgcctgattcatcaagaattttccgtt

SEQ ID NO: 4760 - DNA, 385 bp, Photorhabdus luminescens
ttacgccgtcgtgcgctcattccacgcatcagcatgaatgatgttgccgtctttgtaggtccaggtgattttttcgtaacgcaactcaatgcgttccagatggttgtgcttctctttggtagggtctttgatgtcatgcatcagcggtgccactttcaccaccttcacgttgtccagttgggtgatgaagtactctttctcctgacctgcgtcgtcaatgttgtaccatttgatttcagcagatttcagggtctggccggtggtgaccgctttatacaaatagggacttgatgcatccacctctttggtgaataccaatggggcatgcacacgggtccccgtcagtttgccggtattgttgtccgtcgggatgtgcaacatatgt

SEQ ID NO: 4761 - DNA, 778 bp, Photorhabdus luminescens
  misc_feature (666)..(666): n is a, c, g, or t
aagcttctatattaacttcaatattaggatatttctcattaaaattttttagtctgggaatcagccacgatgcggcaaatgacgaagtggtatttatagagactttatgttcgaactgcattgctttaagagacttaatagatttgtcaatattatcaaacgaaagtaataacgtctcataaacccgatccgctttagccgtaagctttatacctttaggcgttcttaaaaacagcgcaaaaccaattctatcctccaaaatacgaatctgttgactgaccgccccaggagatacacccattgcagccgccgcagctttaacactgccccgtcgaccaacttcagtaaaagctctgagagctaacagaggcaaaatagaactcatattttattctccagtgtgcactgtatgtcctctatacccttggatttcaagatgcatcgcgacggcaagggagcaaatccccgggagcataaagaacgatgtgaccggggtgagtgagtgcagccaacaaagaggcaacttgaaaaatgacgagtatatatgacaaagatactaccatgccaattacagatatcaatatataaaactgaacttcaacacccatacgggaaaatggtaaatgtaaacagaataagacatgcaaatttagaaaaactacgggntggccgttaaataatatagctttaattcacttacttttatgctagtttctcgataatattaataactgaaatattattcagtcagctaatgttaaatagcattgaggattat

SEQ ID NO: 4762 - DNA, 387 bp, Photorhabdus luminescens
aatcctccttgcacaatttccagacaggcattatccgaaggattaccggcgatccggttggcacttctcagcgctgttttatctagcgctccggcagcggaaatacctaaactagcctgtcctgaacggcctaaatcctgaaaaagtgtttgtattccagtggttaggatttccagcgaggcgtgtttatcaacttgcgaaggtagaacgtcctctatgggggcaacagggatttcggctttagtgatagagattgctgcgcctttgcgttgatctctgaaacgtacccggaaaccgggttgtaacagggaagagggagaacgtgagagatcccacatgcgttctggcgtgataccgatgatttgccaacctcccggagtggcttga

SEQ ID NO: 4763 - DNA, 781 bp, Photorhabdus luminescens
aagcttcgattgtcgcgccgattgtttcgctttatggtgcggttaccacgattttgtcactgataaatgggaaaccaatgaccgttttggttttgtttagtctatttatttgtgttattggtgcctgtctaaccagtatgccgaaatcaaaagatggacaacgagaatcatctggttcaattttctttgcacttttgtcttcactgatgtttgggttaggtttctggctgcaaggggaatttgctgttagagatctgggggttatcaatgcattatgggtttactatttaaccgctgtggtggttttatttctcacgctattaaaaaaaggaaatttatcattaccgccgatttcaattattgctctggttttttcaattagtttctttagtctgattgggtttgcttcattagcttacggttctgctacgggacatgttgccgttgttaccgttctgagttcattggcaagtggcgtcaccgcgttattaggtttttttattcgtggagagcggttgagccgcattcagtggatgggtattgtgataattatagccggtgtcattcttttgaaattatgacatttatacccgtcatctttcaagttgcttctttgttggctgcactcactcaccccggtcacatagttatctatgctcccggggattcgctcccttgccgccgcgatgcattcttgaatccataaggtatataatagcttgtttccccgaagaattccggggaacaggtgaggcatgaccattgttaatgatatctgcat

SEQ ID NO: 4764 - DNA, 509 bp, Photorhabdus luminescens
ggaagcatcgtgctgctagacgtgtgctattgtgagcggataacaatttcacacatgaaacagctatgaccatgattacgccaagctatttaggtgacactatagaatactcaagcttgcaagtcccgtttgatagcagcctcggctaactcacggcgcagcggttctgacacttcagcccagtgcggaatgcgaatgcggcgcaggtactgagcttggaagcgtaggaatccaccccgcattttcgttgaataggtcgccacaaacagacgagtgaccgcggatagcaggacagcctgcaaggcccgtaaatcccagtcgtctgacgtgacgtagtagaggttgtggtgaggatacagttcaccattttcatagacgatatgcgcctgtcccttgatatctggaatcaggagctttggcctcgcagccaacgacggcgtgatgcggtcaattgtgcgataccagttggccggagctttctgcgcacagtgacgcccagcgatcacctt

SEQ ID NO: 4765 - DNA, 569 bp, Photorhabdus luminescens
atctgcacgctcaacaagagaaaggattactgcgtttcctgacgtgtggcagcgtggatgatggcaaaagtactctgattggacgcttgttacatgatacccgtcagatctacgaagatcagctttcaacattgcagaatgacagtaaacgtatcggtacccagggtgaaaaattagatctggctttattggtggatggtcttgctgcggagcgcgagcagggtatcaccattgatgtggcttatcgctatttttccacagaaaaacgtaaatttatcattgctgatacgccgggacatgagcagtacacccgtaatatggcaacgggggcatcgacctgtgatctctctattctgttgattgatgcgcgtaaaggtgttcaggagcagacccgtcgtcacagttttatcagtacattgttaggtattcgccatttggtggtcgcggtgaataaaatggatctgatggaatatcgtcaggaggtttttaatcagatcaaacaggattatatgaatttcgctggccaattgccgacaaatttggacgttcattttggcccaatctcggca

SEQ ID NO: 4766 - DNA, 764 bp, Photorhabdus luminescens
aagcttgttctgccatcagacaacgggcgacgactaaatcgtaaaattggaagtaaatggcagctaaccgaccacgtaaccagttgtacagcgcttgattgctgaattttcgttgcaggaaagccagttgagcttgagtttgttcctgttgggttttcaggctggttttttgtaataccgccgcttcacggcgcactgttagtgattgaagttgagcatcgatctgtttcatctctgcttcggcattattacgctggatttcccactcctgacgacgacggcgccatatttcagattgcgagactttctccgcttcaattaacaaaccttctgcggcgatcccgccaccaatagcaatggcattggcaattgccccaaagcgtgttcccccgaccgcaaagccgtagatattgggtaccatctccagcgcggcggcagccatgtgcaagcctttcaatccgctggtaatactttgggaagctattcgcatatccagagcttgacgttcaccggcattgacatcttcatcgtataaatttgctgtagttatcaaagcgcgattgtgccccggctttggattttccagtaccgttttttcagcatctatttcttcaatggtttttcctgaatgcttagcgtcgttatatcagctctttggcttgaatttgcagcagagcatttagggcctcagcatcttggcgttcaataatattttgcaacgtggagccgaactgtgtgagttgagcgaccatgctgcgggcatt

SEQ ID NO: 4767 - DNA, 385 bp, Photorhabdus luminescens
atatcaacgggcagtgggttgatgccgacaatcaagcaacttttaaggtgactaacccagcaaatggtgaagtgattgcccacgtcagtaatatgggtgcggccgaaacagaacgcgcaattgcagccgctcaacaagccctaccagcctggagaaccatgacagccaaacaacgcagccagattctgcaacgttggtttcagttaatgatggcaaatcaaccggcactggctgaattgttgagccgggagcaagggaagtcacagacagaagcgatgggcgaaatcgcttatggtgccagcttcatcgagtggtttgcggaagagggtaaacgcacctacggtgaaaccattccaagcccattgcctggtcgccggattgtcac

SEQ ID NO: 4768 - DNA, 776 bp, Photorhabdus luminescens
  misc_feature (570)..(570): n is a, c, g, or t
aagctttttctactagtaataatgctaatgtagtgagtcaagaaagatatgaagagagtagggatttactgagtgggtttccaccaaatgatgttcctacccatttgttaaataaagtattacgccaatcgtcaaccatagcttctgtcgtggctaattttattgcggcacaatctggtgatgatgttctggatgatggtgatatagctaaacttactgcgcaattaaatcgagcattagaacaaaaaatcacagcaaaaattcccagtgcctcattaacacaaaaaggtattgttcaactgaccaatgagatgggtaataatgacacactggctgtgacgcagaagctggttcaggaaatagtcaattcgttgcgtgaaaatattaatgccaaagtacctaatagccggaaaataaacggtaaggcgttgactggggatatcaatctgactgcgggggatgtgggtgcggtactagctaatgatgcaatgtattcaatgaatattgaatcgttggatggtcgggaaaatctatacaatggttgtgctggatttaaaccgaatgcgccgntcctcactcgatatgggctgccatctgatcgttttggcgttcagctaagatttagcaatataaatggtccatcaagtgaaggaatagatcaagtatggagttctaggctaatttttgttcatggaagcgatacatatcgtacagatcatataaatctagattacaaaattacccgtaaattctgggacgatataaatgctaagccc

SEQ ID NO: 4769 - DNA, 392 bp, Photorhabdus luminescens
ccgcttcctgacgtttacgaacctccgcagcgcgaatacgggccgccaataccgacatcgctttcgctttgtttttatgctgtgaacgttcatcctgacattcaacgacaatgccagttggaatatgagtgatacggatggcggaatccgtggtgttgacatgctgtccacccgcacccgatgaacggaacgtatcaatacgcagatcacttggactgatttccggcaactcggcgtccgggatctccggcaaaaccgcaacggtacaagcagaagtgtgaatacgcccctgcgattcggtttccggtacacgttgaacacgatgaccacccgattcaaattttaaatgaccataaacctgctcaccggaaactttcgcaataatttcctta

SEQ ID NO: 4770 - DNA, 770 bp, Photorhabdus luminescens
aagcttctgccccatcctgagcttcttctacattattaaagcctaattcttttaaaaggttacgaacaatgcgacgcatggttgaaaaatcatcaaccaccaaaaatctcagatccttattcgccataaaaactccttgaaattagttaccagtcagcacagagccgcttaaaaaatattaaatttatacccgttatctttcaaattgcctctttgttggctgcactcgctcaccccggtcacatagtttgctatgctcccggggattcactcccttgccgtcgcgatgcatcttgaaatctttagtgtatacccgttatctttcaagttgcctctttgttggctgcactcgctcaccccagtcacatagtttgctatgctcccggggattcactcccttgccgtcgcgatgcatcttgaaatctttagtgtatatccgacagccgttaaatacggacagcttgccccgagcttatttttgccagcattctcttgctcattttgagtatatccatgacctcgtccaccgcccccatttgtattgccgctcttggcataccaaataccacacaacttgcttcatcctgagccaacgtgtacgctcccgcttggcttatctccagtaaacccgctgcgccatcactgcccatgccggttagtaacacttcaacagcattcttcccggcaaatttagccactgatcggaacaacacatctacagatggacgatgacgattacaggcggtgcatcggtgatcagaacctgatat

SEQ ID NO: 4771 - DNA, 393 bp, Photorhabdus luminescens
caaaatgcggtaatgcattcatctcctcaaacactgttgcataagcaggtagcgctgatggtgcgttaaagacgccggcacaaccacaagaggattctttcttttgttgtgcatgtggtgctgagtctgtacctagaaagaagcgatcacagccactggcgacggctgcccgtaaagcctcttgatgcacattgcgttttagcacaggcagacagtataggtgtggccgaatcccaccaactagcatatggttgcgattgaacatgagatgctgtggagttaatgttgctgccagattgttattgccttccagcacatattgtgcggcttctttggtagttatgtgttcaaacacaactttcagtgctgggaattgattacgtagtggttcca

SEQ ID NO: 4772 - DNA, 768 bp, Photorhabdus luminescens
  misc_feature (637)..(637): n is a, c, g, or t
aagcttccactcatcatgcggagtaattattgtgtagatgaatttgaaaacgatgaaaaaaaccagcgccagcccaaaacacaagccaaaattgcctacaccatgcataaattgagtaaaagcctgttcttcattttccaatgtgatcatttatgccaccactttaaaatcagtttggttaagttgaataccggtgctcagtaccatcaatctatccaggtgactccctacaactttttcttctcccacaacctgaagttcttctgttctgttatgagcaacctgacgcgtatacaccatcacaaactgatcagtttcggttatgtgaccttctttactgtaagttttttcggtaacagccaccggcttaatgttgtcccataacggagagaactgggtaccatcgagatcatatcgtctgcttggtggcacgataccgttttcaatcagcgcatcccattgagcttgtgaatcgatcgggttaatttcataaaaaaaccaaaaacttacttacttcacgcccgtttcccccttgaactttttgaagcactggaagataacccttggcattagcgtattaacaaaccaaacgcaggtatcacctagatcactactctaacggacatataatctgatntgaaacttgctatgtgaaggtaaggcaaaatgatgcatgtggacctcatggggttttgttaagtgccccaccgatgcgaaaactaatactagcgggacctttgaacggaggggcatacggttacaacaatg

SEQ ID NO: 4773 - DNA, 395 bp, Photorhabdus luminescens
  misc_feature (110)..(110): n is a, c, g, or t
  misc_feature (141)..(141): n is a, c, g, or t
cacagcgtccacctttaacgttaaaactgaatcgtccaggtgtataaccacgggtgcgtgattcaggtacgcctgcgaataattcacgaactggtgtaaatacgccggtntaagttgctgggttagagcggggagttcggncaatcgggctctggtcaatatcaatcactttatcgaaatgctctagcccttgaatatcaatataaggtgcaggggtgatattggtcgcgccatttaactggcgttgggcaatcgggaacagagtatcattgattagcgttgatttaccggaaccagaaaccccggtaatacaagtaaataacccaactggcagattgaacgtcccatttttcaggttattaccctttcgctccgatcagggtaaaaaccttttt

SEQ ID NO: 4774 - DNA, 755 bp, Photorhabdus luminescens
  misc_feature (444)..(444): n is a, c, g, or t
aagcttcccagaattagcatcccttgctgaacaagagatcatttctcaacctgagaaatatattaaacaagcgtcagcagagctggatctaagtgctctgacgctgatgctaaattttccgcaagctgccatgcaatcgcaaatcaggggcgatatctctcctgagcagtgggatgatggtttgccgatgtttttcaccaattatcatttaacaggaatgcaatcttggaataaaaatcaaagtgaacagaatcaatatctgaatttacgtagtggctttaatttaggtccgtggcgaattcgtcataatagttactacaaccatacgggtacaacatctgaatggcaatcgcttaaagcctatgctgaacgggatattcgcccattaagatctcgtctggtattgggtgaaacatccaccgatagcatggtattcgatagttncacttttaatggcattaaattgatgtcggatagccaaatgttgccagatagccagcaagggtttgcgcctgttgtccgcggaattgctatgactcacgcaagagtagaagtgcaccaaaaagataatattatttatcagacttttgttccaccaggcgcgtttgaattactgatattaccccagaacctgaaggtgatctggaatatctattatgaaaaaatggcatatcagaaatttactcaccctttgctgctcaccttaatgatccgtgccggccaatgaatattttgctatatcggtaaatcagcga

SEQ ID NO: 4775 - DNA, 397 bp, Photorhabdus luminescens
  misc_feature (68)..(68): n is a, c, g, or t
  misc_feature (98)..(98): n is a, c, g, or t
attgctgaacttatgttgtaggaaggtcagttgtgcatgagtctgttcctgttgcgttttcaggctgnttttctgcaacacggcggcttcacggcgcnctaccagcgaaccaagttgagcatcgatttgtttcagctctgtctcggcgttattacgctgaatttcccactcctgacgacgccgacggtaggcttcagactggctaattttatccgtttcggtgttcatgacactggcggaaatctccatgacattacctgtggcttgtgcgattgccccccaatggctaccaccatcagcgaacccaaagatgttgggggccagatcaagtgcaccgcctgccatatgtgacgcttgaagggccgtagagatgccaacgaccgaagctcccaacgcc

SEQ ID NO: 4776 - DNA, 813 bp, Photorhabdus luminescens
  misc_feature (794)..(794): n is a, c, g, or t
aagcttttattcaggtgaagccttcctatggcttatctgatgaagaaattgctcgtatgataaaagattctatggcaaatgctcaggaagatatcaatgcacgccaactggcagaacaaaaagttgaagcggcgcgggtactggaaagtgtcaccagcgcgttagaaaaagatgccgatctattgaatgaacaagaacaggcggcaattgatgctgccgtagaaacacttataacaagcgttcagggcaatgatcctgaaattatcgaaaacgcgattaaacaactggataagcaaacgcaggaattcgctgcacgtcggatggattcatctattcgtcgagcgctggcgggccattctgtggacgagatttaattatgccgaaaattgtatttttacctcataacgatctttgccctgatggtgcagttctggaagccaaagagggcgaatccattcctgatggttgcattcgcgaatggggattgaaactgaccctgcttgggaaaaattcctgtgcttgcacaacttaggcattggattcgttctgggaaggttataattcacctggaaagaaagttctgaacccgaatgatatcccgcttgcataaagcttggggtgcccgtaaccataataatcgcttgcacttgagatgctaaagcctcctcacaataatatctggtggcgcaaatccaaatacacccccttgaaccattcgctcttatcacttgtgatggatgtcgataatctagtgttgcacgtattgtatagcccgttctttaactatcgcgaanaaccttatgacaaaataag

SEQ ID NO: 4777 - DNA, 771 bp, Photorhabdus luminescens
  misc_feature (312)..(312): n is a, c, g, or t
aagcttcttcccccggtgccggtaacgcccgacggtccagcttgccgtttggtgtcaaggggaaggtatccaggcgtacaaacgctgccggtaccatataatccggcaaaatagcgcttagatgagtacgcagatggttaaccaactcttcattcgcttctgctgctacataagctaccaaccgtttgtcctggctgtcaccctgtgccaacacaacagcttcactcaccgccggatgttccatcagccggacttcgatttcccccggctcaatacggaaaccacggattttcacttgctggtcattacggnctaggaattccagattaccgtctggcaggtaacgggccaaatccccggtgcggtacaagcgggcatccggcttatcactaaacggatctagcagaaaacgttccgcggtcagttcagggcgattgagatagccacaggcaaccccatctccaccgatataaatctcaccagttactctcctgtggcactggctgaccacaggtatctaacatataaaccccccttattggcttatcggtcgaccaatggggatccggcttacttccggtgataatgcccgattgccgtatgtggtaatgaaagtggatcctgcactggttcataccgttgcataattgttgacgctggccttcgcgcgtaacctgggcatggacttgggatcagaattttgtccgtcacatcgggggttgtgaccggcgaaacccgggtgtaatcttgagaaaatacgagtaaacaaat

SEQ ID NO: 4778 - DNA, 426 bp, Photorhabdus luminescens
  misc_feature (55)..(55): n is a, c, g, or t
  misc_feature (112)..(112): n is a, c, g, or t
  misc_feature (119)..(119): n is a, c, g, or t
  misc_feature (124)..(124): n is a, c, g, or t
tgatgaaaaaatatgatctgcgtgacacgcctgatgtggatgaccagcttgcgtntctctctgctcaggaagccagtgcgccgtttgatcttgcccgtggcccattaattcnttccagnctggnacaactggctgacgatgaacacgttttcttgctgacccagcatcatattgtttccgatggctggcctttagggatactaaattcagatttggaggccctttattccgctcacttgattcaacagccggatccgttgccaccgctgactatttattaccttgattacgccgcctggtaccgtcaatcggttgtcggctgaccccatacagtcccaatctgattatctggcgccgaggctcgctcaagcccccgatcctcttgaatttgccgactgcccgggcatttacgccggaatatcgttg

SEQ ID NO: 4779 - DNA, 778 bp, Photorhabdus luminescens
aagcttgctatttttaccccgatttctttcagtaaacggatagataattcaggacaaagtttctcaccacagtcaataaaggacaggcttttaatgccaatatcccttttattgacgataacgttaactttatagatacctggaatatgggcgtccgtttttgccagactctccagattaatattttctctgtcttcgtctgataattgtaatgcattgatatcgaaatacagctctgcatatgctggcaacgataaacaacaaatcattaaagcaaagctaattatttttttcacaatacactcatcagacaatattatcagaaattaaactggcgctcttctgttgtgccaccgtaatcgttgatagcagtcagagttacgctttttatgtcatttttggttgaaaataccttatgactaaaagggggaataaatccgggtttaggtattaatgttccgttaattttcatctcattaagattaacgtaataagctgtggggttagttaattgaacaccatgggcattacgtgatgctgccaaacgattaatggcatcattagcctcgttatcagataacccggatggacgataaatcaatttgataatattttttatcgtgatgatcatcttgctattgtcatttttttcaacggccgggatcgcattgacattaagtaaaaatatcgattcccgatccacaggcagatgattgccgatatatgaagcacggatctggtgttcgctctctttcgacatcttaaacaatggtggagt

SEQ ID NO: 4780 - DNA, 518 bp, Photorhabdus luminescens
  misc_feature (21)..(21): n is a, c, g, or t
  misc_feature (27)..(28): n is a, c, g, or t
  misc_feature (35)..(35): n is a, c, g, or t
ggggcatctctatgacagaantgatcnngtgctantgagagcggataacgatttcacacatgaaacagctatgaccgtgattacgccaagctatttaggtgacactatagaatactcaagctttaatatcgtcaaaacggggattacggctgaggcgaggattatccgggtttggctgtaactcatccaacgttaataccattggcatttctgccataggcttaacaacagtactgattggtgattgtggtgttttgccacgttgaagtattgcatcgcttagagaggttttatgcttactcatatatttccccttttagcaccaagatcataatacctctctgtaagatcactaaaccgggtacaggcaccatcaaactggatcttgactgttccaatcgatccttgacgatgtttaccaataatgatttcggctatcccaatatccgatgtattggcgtcatacacttcatcccggtaaacaaacaagatcagatcagcatcttgctctagcgccc

SEQ ID NO: 4781 - DNA, 769 bp, Photorhabdus luminescens
  misc_feature (615)..(615): n is a, c, g, or t
aagctttagtcagtttatttagccaacgtaaacctgttcgccgtgcttttatcattcaggttcatgataaaaatgtggatgaaaaccccaatttattaattggactggaaataaatggcaccgcagacgaaattgagcaactgatccatgaagcgggcactattgcttgtgaatacacatcggaagaagagccgattgacttctgtttagttgatgaaaaagagagtggcatcagccattatttgattcagcatactcagccattttaccagcgtaaattaggcagttggttacgtgaaagcattccggttatgaataagtgattatttagcgggtgataatatatacccgtcatcttgaaagataacgggtatagcagctttatctgtatctggtagtcaagctcaataacttttaccaggtttttaacttgaaaagccgaccagattctccttcgtcatgcagttgaagaacaatttctgtactgtcaaacactggcagctctttaggagatctagtaggaagatctgaatctattagtgtgataacagactgaatacctaattcaacggtatcgcgtaaaatagccaataaattctctttctttctattatnccaagactcgaatactccatcatgaaaggcaaaatgaggaaatttctcacctttatgaactcttagtacagctaaatcaaaagcgatacctagcagctttctataagtatgtcctaaatctgcactcgttgcgttgcctgaatcatcaagaatt

SEQ ID NO: 4782 - DNA, 389 bp, Photorhabdus luminescens
ttacgccgtcgtgcgctcattccacgcatcagcatgaatgatgttgccgtctttgtaggtccaggtgattttttcgtaacgcaactcaatgcgttccagatggttgtgcttctctttggtagggtctttgatgtcatgcatcagcggtgccactttcaccaccttcacgttgtccagttgggtgatgaagtactctttctcctgacctgcgtcgtcaatgttgtaccatttgatttcagcagatttcagggtctggccggtggtgaccgctttatacaaatagggacttgatgcatccacctctttggtgaataccaatggggcatgcacacgggtccccgtcagtttgccggtattgttgcccgtcgggatgtgcaacatatgttcca

SEQ ID NO: 4783 - DNA, 760 bp, Photorhabdus luminescens
atttatgcctctggtgatttaattgatgagcagagttcactcaatgacggcgctaaacaagcattcattaatcagcgtctgcgccagctcagccaattgcaagcggatgaaaatattgagatccatgcaggaaagattgtcgatctgagaagcatttccttgacggcggggaaagatatcacgctgaccagtggcggcacgcttgatgtgagtaaaatcacagcagaggacccctatgaatatgaagatgaacacggaacgggttatgaaaagcattatgaatatgaaaatgctgatgacgaggaagacgaacaatcttacccacaatttcaattacccatagcgagcagtatcatcactgccggcaataatttaacccttaatgctggtggtgacattattgatactgaggcaactttgtcggcaaaaggggtgactgccattgtcaaaaacaacgcagagttacattcaccgtcagggaggtataactcagttgaagggaaatatacgccagtcacttctgcgctgattgcatgtgcgttaagccatgctcctcaactgaccataaacgcctcagaagtagaaggagaagtcccagggattaaactggcggataagcaaactcggatcacctcgaaaaacaatcaccctattattcatattgcggcacctaacgcccgtggtgtttacataaccgttatcaggagttaatgttggggcttccgggctggtgctcaataatgctaccgaagctacccat

SEQ ID NO: 4784 - DNA, 387 bp, Photorhabdus luminescens
catgggtacgaatagtgatttttgtaatgtcattgatagtcttaccggcgtctttcaattgttgatgcagactgatcgccgcttccaccgcagtttgcgcatgaaattctgccgggaaagcgatcttgaacagcacgttttccatcacataagcgccataggcacgctggaatttaaaaggctgaccattgaacaggacatcatagaatccccacgtttttgcagttaataccgagggatatcccatttcacccttttgcgccatcaaagccaagcgaaccgcgcgggatgttgcatcaccggcagcccaagatttacgtgagccagtattgggagcatgacggtaagttcgcaatgattgaccatcaacccaagctagcgataccg

SEQ ID NO: 4785 - DNA, 569 bp, Photorhabdus luminescens
tcgccgccttgcggccatttctcccggtcaaaattaaacaccacccgatataagccgtctttgtcgatatcgccgtaggtatcattcactttggtactgctcacccgcgcgggtatcgtgccggccatcaccggtttcggcacccgctccgggcgaaagcacacggtctcggaatagggaatggcagtgaatgtcatctcaaaactgctgtcccggcgggcactgttggtgatctgggtgatgatcgcccctttgcgaaacgtttccggggcgtcacctttcactttcaactcctgtcccggcaccagcgtggcggaggtggtcattccccgcaggcggatgcgttgattcaggtaacgttcgtgatgcaaacgggcataaaacaccccgctttccgtctccggttgataggcgtaacgatcaccgggtattcggtagtcgtcacggtaatggtacgcttcgccataagtcgttcgatcgccccgtgtcacattcgtctcggtgttcaagccgggatacggccgggcatcgtggtagtcataattccgagtcgcaatttttccctccac

SEQ ID NO: 4786 - DNA, 764 bp, Photorhabdus luminescens
  misc_feature (764)..(764): n is a, c, g, or t
aagcttaagggtaggttcagaaacgctgacctgataacttcactatatgtcaaatagctaaaattgcgatcctctggttattaaccagtacaaaccgagctttgacttagtgctttatagctagcggagaaagaggcgttgcgcctggcactgtattagtgtgcagctaaattgctgtgcacctttgccaatatcaaataatacttgaggttattaaggggctaataattcagccccagcctgacattttcttgtttttctacctcctttttttactgagattgatgccattacagatcattatcttaatactatcgtgttgctccctagctttccctacccgcaaaccgatatttcagataccaccattttgaacaactgggtttgatgagaagagacaaaccttatacatcagtaagtttgtattctttttcacgagactttgccgcacaagcttccatgtctgttaaatgcataattacggagttaagtgaccagccagcgctgataaaaattgcgcccttgaccactcgtctgaatacctgcgtgaagccctctcagtgtggttagccgccggtgtagaattaaatattcagcgcaggacagagatattttaacagcccatcgattccggcctcacatggcttcgctggcagataatcaggaaaaatatacacccgtgcagaacctgatttatgcactccgtaaggctgaactggtcaggcaggagcctgtgtaaaatccccgaaatcccgctatttttn

SEQ ID NO: 4787 - DNA, 388 bp, Photorhabdus luminescens
tagaggaagctgaaatccatgaaattctgggtagcttagagaaaaaagttgttcgtagccgcgtcttgcgtggtgaaccacgtattgatggtcgtgaaaaagatatggtgcgtgcattggatgtacgtactggtgttctgcctcgaactcatggctctgcgctgtttacccgtggtgaaactcaggctttggttactgcgactttgggtacagaacgtgatgcacagatcattgacgagttgatgggagagcgcacagatcgtttcctactgcactacaacttcccgccatattctgttggtgaaacaggtatgatgggttcaccaaaacgtcgtgaaattggtcatggtcgtttggccaaacgtggtgtggcggcagttatgcccaa

SEQ ID NO: 4788 - DNA, 774 bp, Photorhabdus luminescens
  misc_feature (664)..(664): n is a, c, g, or t
  misc_feature (740)..(740): n is a, c, g, or t
aagcttcgattgtcgcgccgattgtttcgctttatggtgcggttaccacgattttgtcactgataaatgggaaaccaatgaccgttttggttttgtttagtctatttatttgtgttattggtgcctgtctaaccagtatgccgaaatcaaaagatggacaacgagaatcatctggttcaattttctttgcacttttgtcttcactgatgtttgggttaggtttctggctgcaaggggaatttgctgttagagatctgggggttatcaatgcattatgggtttactatttaaccgctgtggtggttttatttctcacgctattaaaaaaaggaaatttatcattaccgccgatttcaattattgctctggttttttcaattagtttctttagtctgattgggtttgcttcattagcttacggttctgctacgggacatgttgccgttgttaccgttctgagttcattggcaagtggcgtcaccgcgttattaggtttttttattcgtggagagcggttgagccgcattcagtggatgggtattgtgataattatagccggtgtcattcttttgaaattatgacatttatacccgtcatctttcaagttgcttctttgttggctgcactcactcaccccggtcacatagttatctatgctcccggngattcgctcccttgccgccgcgatgcatcttgaaatccatagggtatataatagcttggttccccgaagattccgnggaacagtgaggtaatgacattgattaatgatat

SEQ ID NO: 4789 - DNA, 509 bp, Photorhabdus luminescens
  misc_feature (21)..(21): n is a, c, g, or t
  misc_feature (28)..(28): n is a, c, g, or t
aaggtggactcgctgctggantactgtngtcttattgtgagcggataacaatttcacacatgaaacagctatgaccatgattacgccaagctatttaggtgacactatagaatactcaagcttgcaagtcccgtttgatagcagcctcggctaactcacggcgcagcggttctgacacttcagcccagtgcggaatgcgaatgcggcgcaggtactgagcttggaagcgtaggaatccaccccgcattttcgttgaataggtcgccacaaacagacgagtgaccgcggatagcaggacagcctgcaaggcccgtaaatcccagtcgtctgacgtgacgtagtagaggttgtggtgaggatacagttcaccattttcatagacgatatgcgcctgtcccttgatatctggaatcaggagctttggcctcgcagccaacgacggcgtgatgcggtcaattgtgcgataccagttggccggagctttctgcgcacagtgacgcccagcgatc

SEQ ID NO: 4790 - DNA, 761 bp, Photorhabdus luminescens
  misc_feature (542)..(542): n is a, c, g, or t
aagcttgttcttttaagtgatctatttcaaactgaataatctcaattgcaccatttgaagataaacagtgaatacgaacctgacctaatatatcctctacaaaaagatttatttttgaattaaaatccattcttattttactatgagttagatagcgaaaagataaagttttcgctaactctcttaattcccttacctttaaatccagtaggttatcttgcttcatatctccccttataaaaccgatttcttattttcaaatcacaaaaccattaacataacttatgtaacataacaaaaaaaaaccaataaagaaacaatgaacagagctatatagataaatccactcgaataacgagtggattttcacataaatagatagattaaaattattaaatcaagatacgtagcatacgacgcagaggctctgctgctccccacagcaattggtcaccgacagtaaaagcagataaatactctggtcccatattcagcttacgtaaacgccctacaggagtatccaaagttcccgttaccggcgncggagttaattcacgcatactcaattcgcgatcatttggaatacacgaacccagtcgttatgcgcaggcagtaattgctcaatccaggaatcgaatattttttttaatttcaaagtaatgcctggctgtggccacgcagcgccccatacgtacacacaaacctccacagtaatgatgttattaccggtattcacgatcttgttggtttctgcctgacct

SEQ ID NO: 4791 - DNA, 402 bp, Photorhabdus luminescens
  misc_feature (209)..(209): n is a, c, g, or t
ggaatggtattaccagaaaattggtaacagcaaatgcccgattgtcgatacctggtggcaaacagaaactggtggcttcatgatcacaccactaccaggcgcaaccgaactaaaagcaggttccgcaacgctacctttcttcggtgttcagcccgcattggttgataatcttggtgaacaactagaaggtgtttgtgaaggaaacctanttattaccgattcctggccaggacaagcacgctcactatttggcgatcatgaccgtttcgaacaaacctatttctctaccttcaagggaatgtattctagtggtgatggcgcacgcccgtgatgaatatggctactattggataacctggtcgagtggatgatgtgctgaatatttccggccaccgtctaggt

SEQ ID NO: 4792 - DNA, 774 bp, Photorhabdus luminescens
  misc_feature (394)..(394): n is a, c, g, or t
aagcttaaaggtgaagatgcaactggagctgttataggtgcggctgttggtactgtagcaggtgctaaaggtggaaaaataattacagataaactggctcctgtcgttatcagtcctgtagcgtcagaaataggtggtgctatcggaggtactgttgtaggtacagtaataggcactggtattgaaaaccagataaaagaaaatggagctaaaaatggaaaataaacgaataggattaaaagcttttatcctacttacagcttactggacatcgtttatttttcttttggcctttattgcagggttagctgtacctgcattttattattttgaaaatggttattttaattatcattggaatgattttatttacactgcgagagtaggagttggngcaggattgcctgttggaattggaaattgggtattggcgaagatagaagaaattcgcaaaagaaatcctcttcagatccttagctacctaattcggccaatataatcgcaagtctggatacagcttgttgcggataataatgccctagcataccaatgccaccaccatcgatagccggttcaaaccaccggtgaagccctgaatggagcaaaccatacaatagcttcagctttggacaaaaaatctgaaggaaatggggagagtctatagataaaggccccccatggtcctttgggcggggtatgttcgtaagaaattggcgatatgaaagccaaccaaatggcgggaagatttcgacaaagaaaaaatgcttcatgtgg

SEQ ID NO: 4793 - DNA, 398 bp, Photorhabdus luminescens
  misc_feature (220)..(220): n is a, c, g, or t
  misc_feature (287)..(287): n is a, c, g, or t
gttggctgaaaccgaacgtcatctgaaggggatagcccgaccagaagggctgtttaacgattcattggtgactggtcagtcctggcggggacagcaacgtcgtacccggatggtcatttatcgttgggcccctgtcggacagaaagaaagcttgctacccattgtgttgcttaatcaggtgtgtgaccgactgacagcttctctggctagtacaggtatnttgtgccaacgacaaaatggtgaacaggttcatcactggttactgcgattattcaatcctgatccanattggatagacaaagcgacgttgtatcaggcagcttgttatgctaccccacaggctggtgagaggaagccagataatgatttcaccgaaaccttgtggtttaccccgccat

SEQ ID NO: 4794 - DNA, 769 bp, Photorhabdus luminescens
aagctttaccgctatcagccatcacttgtaataccgtcaatgataaacgaccaccggtaatttctggatataacgaaccggaaagtgtcattgtgtcgttacccggccccagaaattgccaagcaggccgtatcccgatacggctgttaaaagcatgccgccatgactgctgatgttgcatactctggtatggtgtggtcttcaacataaaaacaaataaacccagtgcagccatcataattagaattctcctctatcagagaatgaactgcgtaaacgcgcctgctgtttacgttcccgatcatccaattcgcgcctaaccgctgctgcaatatcctgcgcagattgccccggtgcaccatagatatttatatgatagaccggtgattcactgcgatactctaccatctgccgtttgtctgctttcttttcctgaatctgaggataagcatgaaccgggtagctctgaacatgcaatggtgcggttctggctgcgggagaaggtgccattacgctcaaaaatatgccgcagcggcagcaagtttggcagtctgtcgtcggctaatacatttgacagggccagtgacaatctctggtccatattcacccacaataccaaatcggccagccggaataatgccccctttgtcatgcttgggcagaaccgaactaacattaggactcacattattactgggcgtctgttgaaatattctccctttgacccgcatccagtcaagggagatactcagacaatgaagtcagtgtt

SEQ ID NO: 4795 - DNA, 394 bp, Photorhabdus luminescens
ccttattttcagtgggttaacacaatgataagtaatgtaaaaaattcgatacgcggaacatatcattcgattagcaaaaagtatttacctcgttatcttgccgaattctgtttcaagttcaattggcgctttaaccttaaaaaaacattcgaacagcttatttattcatgtatccgggcagcacctatacctgagtatttactcaagctagctgagattcgatggtaatcaggtaaaagaatgctcaccagatggaaatccaaaataactaaacagccttctgcatccatatgggctctaaaaatggttctcaccttcctaccccttgtatgcaaccgccttcaaactctacctctcaatgagccgtagccgtaacagaagcgattacacatga

SEQ ID NO: 4796 - DNA, 803 bp, Photorhabdus luminescens
  misc_feature (41)..(41): n is a, c, g, or t
  misc_feature (78)..(78): n is a, c, g, or t
  misc_feature (104)..(104): n is a, c, g, or t
  misc_feature (145)..(145): n is a, c, g, or t
  misc_feature (167)..(167): n is a, c, g, or t
aagctttgatgcttttatattatacatggaagacaggagcnatctttggattataaaagatagtgaatctcgattcgnctatgctaatgatgttgcactctatnacagcgatcttcctaagggttttaacatagaagggaggctngatagtgaatgtccagctccgnggtctgaggttgcagatattataccggctaacgatcaaaacgtactgacgagtcgaataaccatccctgtactaaacaccttaatttatggagggaaagaaaagatgatacagccgtgtctagctgaccttacaccgataataaaggatggaaaattgtatcggcgttgtacgacacggtaaaaaacttgaaacttatggcttgaaccattttcgaaaaccacaggcacctgtgactcattaacttttaggcacaaccgactgatcgtctctaccgccaagagagttcaatcgcactattttttagcgtggaaattctcttcagtcgttacacatatagcagagacaaatatacgtattcacctatacgaccagtaccacactccgttcctattatatctactggaaaactggctattttttcactcaccccaattaaccgaaaccctgctaaatacttgggctctattatttatgcgtgccgtcattttcttcccccctatccccatcttccttttggcctcaccaatgaaccaccccatcacaagatctatgccatttatggtgcgacttcgcgaacccttttcccttgtttctttcccctttatttcgctgcggtatatcggaataacgcatg

SEQ ID NO: 4797 - DNA, 780 bp, Photorhabdus luminescens
aagcttgcgttttaatggcaaaaattttgttgttggtgatgctgctgattttgactggtcacaggtacagctcgctttttttgtggctggattagaggctacggcacaatatgttgaaaaagcgacagaagaaggttgtttggttatcgatagcagtgggttgtttgctatggagcctgatgtacctttagttgttccaggggtgaatcctcatgttttggcggattatcgtaaccgaaatattattgccttagcagatagtatgaccagtcaggtactgacagccattaaaccgctggtggatgcggctggaattgcacgtttgcatttgactaatctgttttctgtttctgttcacggcaaagcggccgttgatgaattagctggacagagcgcccgtttgcttaatggcattccaccggagccaggtcatttcagtaaacaactggcatttaatcttttgcccgtgccaacagaagctgaaggttctgtgcgtgaagagcgtctccttgtggatcagatacgcaaaattttacaggatgagggattacccatttcagtgagttgcgttcagtcttccgttttttatggccatgctcaaggtgtcccattgggaacattgcgttcggctggggtggcaaaaattcgagaagaattacagcggatggttgatattaaccttgcagattaaagctattattcaacttcattgaccgaagcatctggtaaaggagtgctaaaattcggtggttgccccttatattgtatcccgataaataa

SEQ ID NO: 4798 - DNA, 396 bp, Photorhabdus luminescens
  misc_feature (139)..(139): n is a, c, g, or t
  misc_feature (275)..(275): n is a, c, g, or t
  misc_feature (358)..(358): n is a, c, g, or t
taaaccgcatcacatcagagaaaatgggtatgacaccgtaagcgcccgccggaactctggccgccatatcttccagtaagctataagtatcaacgccaagacgctccgccaacagcttttcttccgcgcaaaatgcatncctaaaccaacgcatggttaagccagtaaagaaactaatcgactccgcctgaaccatgccgggaataacatgaggatttatccgtgtattcatatttgggtcagtgaccggttcaggcagattaacaacctgctgncaaaatgtgccaccaataacggcggtctgggcaggtttgaccacacctaaaccaagacagcctgagctgtacatcaccaccgnccataatgaccggtgtgccaatatttagtccacattga

SEQ ID NO: 4799 - DNA, 779 bp, Photorhabdus luminescens
aagcttctgttgcttcaacacgaatagggaaaatagcatctgttgtcggttttactgcctcaatttgtggctcagatagtggcattttattagcgaccgccacatcacgcgcaacccctataatacttaggcagtcagcgcgattaggcgtaatactaatttcaatgaccttatcatccagcttcagatattcacgcagatcaacacctaaaggagcatcaattggcaattcaataataccgtcgtgatcctcagaaatacccagttcagaaaaagaacatagcatcccttcagaaggctcacctcgcagttttgccgccttgattttgaaatcacccggtaatacagcacccacggttgctacagcaactttcaaccccaagcggcaatttggtgcaccacaaacgatgtccagcagtcgttcaccgcctacattcacttttgttacccgtagcttatctgcatttggatgctgagcacattgaacaacttcaccgacaaccacaccatgaaattgaccggcaacggcttcaacgccatcaactttcagacctatcatggtaatttgatcagataatgtttcactgctaatggctggatttacccattcgcgtaaccagaggtcacttgaattcatgagatatttccgcccttatttaaactgtgtgagaaaacgcagatcattttcgaagaacgcacgcaaatcagttacaccgtaacgtaacattgtcaggcgttccactcccatgccgaaagcaaaccagataaatttcatgata

SEQ ID NO: 4800 - DNA, 395 bp, Photorhabdus luminescens
ttgcccggcaagtttatgaagcaccgcagggagaaacagaaatcctattggctgctatctggagcgagttgttggggattgaacagatcagtcggcacgatagtttctttgccttgggcggccattctctgcttgcggtgcggatgattgagcgcctgcgtaacgtggggttaacgctggcggtacgtgacctatttcaatctccgatgttatcggcatttgcccaaacagtaggccaatcacctccggtggtggtgccggcgaatgtcatcaccccggcgaccacggcacttacacccgaaatgttgccgctgattgagctgacccagcttgaaattgaccatatcgtgggacaagtgccgggtgggatggctaatattcaggatatctatgcc

SEQ ID NO: 4801 - DNA, 771 bp, Photorhabdus luminescens
  misc_feature (655)..(655): n is a, c, g, or t
aagcttgtgcattaaaaacatggttaatctgcttttccctaatactccaaagaaattctaatttactccttaatttctctttatcaaaggtatcaataagccgaatgccatgacggttggctttgtcttcaacacaggctccgacaccgacacccactgagccgatcttctgtttacctttatatttttctgacgctcgatttaactcggcgtgtaatggtaagacaatatggcatcgcggatcgataaatatatgagaatcaatatcttctttttttataaagtcgatctctttaaccagaatgggaagactgattaaagcaccttggcagatatataagttctttttgttgagtgatgcgggtaattgagaaaatgagcctcttagattaccatgttgcacacaatgacctgcattagcgccgccattaaatcgagcaatgttattgatattgccagataaatagtcaacaaattttcccttaccttcatctccaaattggagtccaactacagccgttaacatgaatctgttccttaattatttattgatttactctaaataatagttaaataatccagtttggataatatttttaagatgaataatctgctcttttaaaactaatatgctaactatctattcatacatcgntataaattatcccttttcttatccgattattttgaaaatcatttatgattatttctggattagcgagtcagctattaataacgctttacttaatgtatcaacaatggggacaccgg

SEQ ID NO: 4802 - DNA, 393 bp, Photorhabdus luminescens
tacccgtaccgcccgcagagggtgtgccggggaccattccgcaacccctgacaaaaaatccaccgcttctcagtacttcccgttggtcgtttttacccagctatgaagactgggttgttcttgggcaggaggtggctggtctgactgaaaatgggttgaattatgtccgcgacagtacccgggagctccttgcccagtttggtacctggttaaatcaagctgggaagtgggtgtgtgaagagattattgatccgataagccatcagatcagttacgcgttttcctgggtcagtgaacaaacgggaaaaatcgtgacctggacggagagtgagataaaagcccggtggcagacggtgcaacagggttcagatatcaccctggaagagtaaaaaa

SEQ ID NO: 4803 - DNA, 768 bp, Photorhabdus luminescens
aagcttcccggctcatacggagtatctcttctggcaccatactattcaaatgtggtggacgtgctgctgataagaccaaatattcaacggttcggttagcttgttctaaaagtaatgccagttcatgacataacaaagcgcccatactatgaccaataagaagaagaggcccctgtgtatgcagcaatacatcttttgccgcggtagccaccaaatctcttatacataaagggagtggttcaatacttcgagaacctcgtcccggatactgaagcaccagcactcgataactatcagtcaacagttgctgaacccagtcggtcatagaataagcactgccgccgccaaaaggcgcaatcacaacagtcattgtcgtctgctgtcgatcgcagtaattccataatcctggcgtcagttgaacacgtttcattccaacgtctctgcggaaactttcaatttaggatcactccaatatgtagctatccaatccaggcattcttgttctgatcccgaaaacccacattttgccaccctaacggtaatatccgcccttcaggccaaatggagtgcttaccctttttgttacataccaccctgtaattcatgatgtttcgctccgccgtttgatagtcaccacttgatccgcctgagcaagcaggtcaatattttgcgaggctacaatccagatccccgaccactttttaggcagtgctgaccatatggctcgggcgggatcagtatccagagatgaatcgcaatcatcgacaa

SEQ ID NO: 4804 - DNA, 390 bp, Photorhabdus luminescens
cttctaccgggccatccagaaatgcttgttcttcagcggttagctgaggccttggatagtcatgcaattttttccagtcgggtttaccgcggaacagctcgccttcccaccaggtagttcctgcatcaagagcttctttttccgtgcgagatagacttggcattactttacggaaggcttttaaggccggaacagttagtaaggagtggcgcattggcgcaaaattcagcgggaacagaataatggccattggtaacaacatccagtagctccatgcatcaatagcgcccatcaggacggtatagacaaggagcagtaggctgctgagactgagattgactttgtgatagcaaagtatcccaatccaagactaagaatagaataatactc

SEQ ID NO: 4805 - DNA, 826 bp, Photorhabdus luminescens
  misc_feature (806)..(806): n is a, c, g, or t
ctatacgggcactgaccctgggcttctctagagtcaccctgcaggcatgcaagctttgctgctcagaggaaatggcgggcgtgaacttattgcccggacgctgacagaaagaggtgccacagttgactattgtgaatgttatttccgccagcccgtagactacccggcagcagaattcagtgcccactggcaaaagtatggagtacaaactttagttgtaaccagtggcgaaatactgcaactgttatataacttaatacccgaaagtgatcgaaacaggtggttattgcattgccgcctgattgtggtaagcgaacgtcttgcacatgccgcccgaaatttgggctggcaggatgttaaagttgcaaaaagtgcagataacgacgccttaattcaggcactagaataaactgacatgggatgcccactatgacggagcaaaaacagtcctccgagacagttgaacaaacaaaaactacggttgaaaactcgcaacagctcgaaaccgcgcctcaaaagcaagaacgttctggcacgctaaaaaacataattgctattgccatcatgctggcaatcggtggcggtctttattattacggacagcaaccaagccatttactgagtacagagaaccacgagctacgccaacaactggaatcattgaaacaacaaccatcacaggataaacagcatattgaagcgctgtttaatagacaatcacagactttaagcccattttccgcacaaatgagcaactgggtcatagtctacaagagttacaggccaaaatctctgcgttatccagntttgatgtaaaagctggctc

SEQ ID NO: 4806 - DNA, 383 bp, Photorhabdus luminescens
tctttggcttgtttgatggcacgacagatgataaatggggctggttagatccagtcaatccttaatagaactatacccaatggatttcaagagggatcgcgacggcaagggagcgaatccccgggagcatagagaactatgtgaccggggtgagtgagtgcagccaacaaagaggcaacttgaaagatgacgggtatataaataatttaacgggcggttcgttccccgcctgttttgataacacgggagtgaagataatgcctaagtaccgttctgccactacgactcatggccgcaatatggcaggagctcgcgctttatggcgcgcgacagggatgaccgatgcagatttcggtaaaccgattattgcagtagttaactca

SEQ ID NO: 4807 - DNA, 657 bp, Photorhabdus luminescens
  misc_feature (36)..(36): n is a, c, g, or t
  misc_feature (48)..(48): n is a, c, g, or t
  misc_feature (67)..(67): n is a, c, g, or t
  misc_feature (69)..(69): n is a, c, g, or t
  misc_feature (78)..(78): n is a, c, g, or t
  misc_feature (92)..(92): n is a, c, g, or t
  misc_feature (97)..(97): n is a, c, g, or t
  misc_feature (105)..(105): n is a, c, g, or t
  misc_feature (111)..(111): n is a, c, g, or t
  misc_feature (129)..(129): n is a, c, g, or t
  misc_feature (133)..(133): n is a, c, g, or t
  misc_feature (174)..(174): n is a, c, g, or t
  misc_feature (181)..(181): n is a, c, g, or t
  misc_feature (189)..(189): n is a, c, g, or t
  misc_feature (412)..(412): n is a, c, g, or t
ctatgacacaacgagctggtcgggcaggacggttanaagccggtgtgngttggcatctattcagccnanaacaggcanaaagagcggtagancatantgagcccnaaattntgaatgctgatctcaatngctnatggctctccttattgcagtgggggtgtcatgacatttctnaattgcnctggctanatataccacctgctgagggtctggcggtggctaagtcgctgctattacacttaggtgcaataattaacagtggtcactcaacgttcagaggctgtaaaatggaagaatccggccgtgatccccgtctggctaatccggttggcgcggcgttggaacatgggctcgtattctgttttccgtccctctgctgacctgtattctgtacgatcccgcccactatggnctattcagaattacttttttccccccccaccccacttattcttcgtgttccggctgccttgcttttcctctatactcggccgtcccttttctctgttatttctccatccactcccttcttctcctctaccgtttttcttcgcaatgccaatctcctccctccgcaggcctccccactttcgttcgtctcgaatcacccttttctccctctatttatcgtccccctcgcctctccctactcctaat

SEQ ID NO: 4808 - DNA, 752 bp, Photorhabdus luminescens
taaaatcgctccattataaatatccccaattggggtttgaatattatgagaggtataaggtagcaactcagatgctgcctctaataataaacgaatgatacgatcagaataaaatacaaactccgattgttcggctttacgattacgcgcttttgtatgcaaagaagtcaaatattgacttttcggcaaaacatgcacgtttttataattctccattataactccaactcatatttatagataaatgttattcagccgtacttggtctcaaataaacccgtgataattaacgtgcctatttagatcatcacatatcgattaaaagataaactctcatatccattctcttaatgcaataggccgaagctacagaatattttatatactactgctttattgtttaaatagttgtatttagcaacaaaatcaaaaataggttcttaaattcaagccatattttcagacttgtcttatttctctataaacctttatatggaaccctaatctgacttgtcagaaaaataaaaaatagacccgttatctttcaagttgcctctttgttggctgcgatgaccgaacattaaacctacataatgtaacaatttcttatagttaatatatacgataatacattttgccgaataaattgcagaaaactattatagctcttaccagaatcatcaagaaatgctaaagttgaaggatatgaatatttcaaatgagcatgccatatgatccaggaaaaacgtgtt

SEQ ID NO: 4809 - DNA, 381 bp, Photorhabdus luminescens
attggtgagctgtattcgggggaattaggcagcgcagatagcaaagttatataccctatggatttcgagatgcatcgcgacggcaagggagcgaatccccgggagcatagataactatgtgaccggggtgagtgagtgcagccaacaaagaggcaacttgaaagataacgggtatagacgtaaatgagagttattttgttgttacatctaaagtggaaggtaagtgatggctaagatttacgaattctctgccaatgatatagcaactattgaaagtcataaacatttgcccaatactatgaagtatggaaacggcaatggtggtggaggtggtgatatgttggaagctcgtgtagcaaaacttgaatcagacgttgagca

SEQ ID NO: 4810 - DNA, 772 bp, Photorhabdus luminescens
  misc_feature (485)..(485): n is a, c, g, or t
  misc_feature (676)..(676): n is a, c, g, or t
  misc_feature (772)..(772): n is a, c, g, or t
aagcttgtccacgttaccttggacgggtaattaaaaacattaatgtgaaagcggcaacaccccaatggatgcgtgaaaaattacgtcgtggtggtatccgttccatcgacccgattgtcgatgtgactaactatgtattgcttgaattaggccaaccattgcatgcgtttgatttggagcgtttgaatggctcaatcactgtgcgcatggcgaagcaggatgaaaaattggtgctgctggatggtacagaagccaatctttctactgataccctagttatttctgatgaaaaacaagctgttgcaatggctggtatttttggcggtgaacattcaggtgtgaatgaagaaacgcaaaatattttacttgagtgcgcattttttgctcctttagcgattgctggccgtgctcgtcgttatggtttacacactgatgcttctcatcgttatgaacgtggagttgatcctcagttacaacacaaagcnatagagagaacaactcaattattgattgatatttgtggtggtgaagctggcccgattattgatgttactgatgaatctcaattgcctcaatctgcgacaatcacattgcgtcgtgaaaaactggatcgtttgattggtcactatatacctgatgaacaggttggtgacatcctgacccacttaggttgcanagtcactattcaggaaaattgttggcaagcggttgcaccaagctggcgttttgatgtggagattgaagaagatttggtggaagaggttgcccgtan

SEQ ID NO: 4811 - DNA, 382 bp, Photorhabdus luminescens
aaagtgctatttgttgcaatgattcgtaaacaccatgatcacggctgtaaagcatggctcgtttaaccccgttaatagcaattggtggccgatcagcaatacgccgggcagtcgcgagagcaccttcgattagtgtttccgtagaagggaacacttttaccaccagccccaaatcatgagcctgaaccgcactcaacgtatccccagttagcgcgagatagcgagctataccacttgggatcaaatgttgcaaacgttgaagaatacctaagtcagccatcataccaatattggtttcttctatacgaaacttcgcattttcagcagcaaaacaaaaatcgcacgcagcaattaaatcaaaacctgcaccaagacaagcgcc

SEQ ID NO: 4812 - DNA, 779 bp, Photorhabdus luminescens
aagctttgtactatcttaccggcagtctcgccgcctgcgacaataaaggtattgaatcctagctggctcagaccttttacaacgctggcgaaggtgttttctattgcttcactggcagtagttgcaccatattgttgctggattttctgtaatgtttctgggaggtgagtggtgtatagcatcggtgccagatagttttcggattgctgaataacccacgcaaccagcttttcggcatattgtggatcattgatgcatgaatcaatattcagggctttagttggagcgaatttctggtatagagcaacttgtttgttggtcatgacggaacaactgccagaaaggatcacggtgcgtctattctcggcgggtggggttgctccttccggttggtatggcatcaatggcttaccggtgtctgtgctggcaagggcagcaccaagaccagagccaccagtgattaatttcagcgctgatgccgctctggccataggcagtaggttattcatgggagagggtatctgttattggctagcgtatgttttgttgttggaaatgatttagccttacgccgattgccctgctgccttggtgtacacatgccagatccaccagatctggtttccccttgagcttggtgttctattaggcgcagtagattggcatctggcctttggtgtcaccggatggtgctgcataccacttcattaaagtagtggccgttgaaaatagatgcccatgtataacggttcgcccgtaacgggaagggcaggggaaaa

SEQ ID NO: 4813 - DNA, 384 bp, Photorhabdus luminescens
aatatgggtacccttaccggcgcaccgaaagtacgcgcaatgcaacttatcgctcactatgaaagtgaacgccgtggtagttacggtggggctgtcggttatttcaccggcaaaggggatatggataattgtatcgttattcgctctgcttacgtggaagatggcatggcgacgattcaggttggcgcaggtatcgtactggattccgaacctttagccgaatccgaagagactcgtaacaaagcaagagccgtcattcgggcaattattgaggctcatcaggcagaggagactttctaatggcaaatattcttctgctcgacaatgtggattcattcacctataacctcgtcgatcaattacgtaatcatggtcatcaggttg

SEQ ID NO: 4814 - DNA, 765 bp, Photorhabdus luminescens
ctattacgctgcgcacagtatcagtgcaacatttatgggaattcttagctcattgattcctcttttgactgtgatcatcagtatatttgttttacgtgttgtccccactgtcggccttgctcttggtaccgttctatctctgtctggtttaatctggttggtcagcgccggtgatcccatatcattattgcaacacggtttaggccgcggcgaattgatgatgttgcttgcttccatctcctacgcactctatggcgtattaaccaaacattggtctattccattacccaactggcaatccctatatgtacaaatcacttttggtgtcctgttattactgccaaatttcctattgaccaaagatgttcaattgaatgccagcaatatctcgttagtcttattcgccggtattccagcttcgatcattgccccctatttatggatacaaggcgtcataaaacttggtgcgaataccaccaccatatttatgaatttgacgccgatatttacagctattatcgctattctggttctgcatgaagagatgcacagttaccacctgattggtggcagtataacgttattaggcgttatactggcacagcaactacgtacccctcttattagataacctcacgaaattatcctcagaaagcctaaagggattcttactaataaccgcccagtgttccactgggcataattggggatgagtccatgataataccgaatctttaacagagctattctatgcctgcgctcagc

SEQ ID NO: 4815 - DNA, 504 bp, Photorhabdus luminescens
  misc_feature (21)..(21): n is a, c, g, or t
acgactcatgctgtatgacgngtgctatggagcggataacaatttcacacatgaaacagctatgaccgtgattacgccaagctatttaggtgacactatagaatactcaagcttggtgccggtgatttggatgccggtatgcttggtggtgcgaatattatcacgcatctcaacgatggtgaaatatcaggtaccacggcggttgcgttagggggggccaatattctgacgaaaaagggcagaggtaaagctattgcgctgatgggtggtggtgccaacgtgttgactcacattggcaatgggagtacgacggggatgatgttatgtggtgctaatatcttgactaaagtcggaaacggtgacgccacgggtatcatgctcggcctgggcaatgtgtttactcatgtcagtagcggccatacgctgggagttatgggagccgcaggcaatgtttttaccaaagtgggtagtgtaactaccaccgcggccatgattggtggcggc

SEQ ID NO: 4816 - DNA, 795 bp, Photorhabdus luminescens
aagctttatgtcaaagaggaagccgctggtagagacgttttggctgttctagataatcgctatgttcagaaggttaaccattatgcgtttgcactaccggtccttcaggcttatggagtcatcgtatcacgtaagtggcctagtgacttaccatcaacggatgatatccgggcttatgctagcacctctgttaacaacaagcttttttaccggccggtagtcgatctcgataaagtcagagtagcgttcactaagaagaaggagggggaagagttcatccgtaccacgctttttcatctcctcccagtccgtaaaaaatttacccatatcttcgtgttcatgctgatttttgtggtagcgatgactctgtgggatcacctcggtgaggggaatgtcgcgaatatgttgcttgcagtaggggcttttgctgtcggcagcatgtctgtcatgatggtaccggtttttcacgtaaggaaaaaatacttgactgatgaaagtcagtgacatagtggggtgtgctccagaagatgtattcgcagcaaaaattttggacattttacaagtcctgctattctggataatacgaaagggaggccttaccgtgaaactgaaacagccaagataccaatattcttccggaattgcccatcattgcttcccacgccttcatcttatgagaagattccagtctgccccgggatagttcatgcttatatatttgccaaacccactccccttgatcccaatattgaatacgctgtgtggtactcaaaattacacgctcagcatcagaat

SEQ ID NO: 4817 - DNA, 784 bp, Photorhabdus luminescens
aagcttgaatagttttgcagatttttgacaaagtgttggtcttttggtcagcactttggacggatagcggttaaccgtctgaccataatttgaaaaaatctgcggtgtacttctgccaattcgtcactgctgcttgaattctcacttttgataattaatagtaataaaagtgttgcaaaatatgatgaattacaagcatcaatcgacattatttctctaactttcagaatattcctatatatttttaagtgaaattcattgcactattgaacatttattaatccataaatggcaaaagcatgatgatgatttcagttagattcactcttcatgttgtaactcattggagaagtgaataaatggcaatagggtatttcctgctcgttggtgataaaacaacctgtggtggtcagattattactggtgaccacaccatgacatttaatgggcgagcaaccgctcgtgaaggggataaggttacctgtggcaaacatcccggtacttacgtgattgttggcggtgtatccgatgtgtttgacatggggcgcaagttggctggcccgtggatagtgacagtacttgtccctgtcgggctcggcttatcaattccggagaaggacagtttggagaagcaagataagactgctgaccgggtttgccgctcccacgaatatggcgcaaaacatttctctcctacggtaacgatgtgggaagcccgcctgccactcatgtccctcgtcgcctatcccggtgttacgaattcctccatcggggtatagggtgt

SEQ ID NO: 4818 - DNA, 404 bp, Photorhabdus luminescens
  misc_feature (211)..(212): n is a, c, g, or t
  misc_feature (229)..(229): n is a, c, g, or t
tacgccaagtgccgtcaaaatgcgttatggtcatctgctgtcggctgtataacaggatgtcgcggtccagttgctgcttgtaagcgttgatcgcaggtgtgccgggcacatcgttcatctgctgccgtctttgctgcaatgtctgcaactggtcgccgacagaaacggggctgtcctgcatctgaaaatgctgagcagccagcacactcanngtactctgctgcatttnctgtaaccgctcgtctacctgcctgatgtagtcggcacgctcatcatgtcttatattaaaccattcggtctgacgacttgctgcctaaatctgtccatcgatcagggtattgagcaggttcctgaagtctttggatatagaaaccattgcaatgctccttttgcctgttttaagc

SEQ ID NO: 4819 - DNA, 782 bp, Photorhabdus luminescens
  misc_feature (718)..(718): n is a, c, g, or t
gcaataaatagtacaccaaaaagaacaggtagataaaataaataactgactttattactccaatattattatcagaataactcactgccaggatttccctgcatcccatatttgaaagaggaaatcctggagatttgctaaccaacacacactccatatataccaagccataaatgaaacaaaaattctaatattctattttttctgttcttacctctgaatggtacctaactcattataaaattaaccttatataacgagatgttacctaaaaacccttatcagatcacaacttggaactaatgttttcatttaagttgaaaatgaaacaaatatttcctataacaggtatacgacaataaccaaggctaactggcaaacactaaagaattgactgcaacaatataccctatggatttcaagatgcatcgcgacggcaagggagcgaatccccgggagcacagataacgatgtgaccggggtgagtgagtgcagccaacaaagaggcaacttgaaggataacgggtataaacgacctatccgcttccttctattcggagaaacaactatatggaagagattcgtatcggcctaatcggtactggttacatcggacggacgcatgccattgcttacgcacaagcgccgactgttttccctctggcaggcaaactagtttgtgaaatggtagcggaagtttctgctgaactcgccgcanaacggtctgagcaattaagtttcccggcgtttactgataattggcgcaattaatatcagatcca

SEQ ID NO: 4820 - DNA, 388 bp, Photorhabdus luminescens
tttaacctggggtatatcaaaagcggcgcgtagcctgttaacaaactcgttatcttcacaaatggttttgccagggctgtctgaaagctttgcgaccggtttgccattacactcgacaagtttgatgacgatgttcagtggcttaacccctgggatattgcaggtgagctgtgtaccgataccgaaaatcaggtttattctgttgtggaaatgacgatagagcgctagtgctttttgaaagtccaagctgtcagagaacactaaggtctttgtcattgggtcgatacccagtttttgatagtgggcgatcgctttttcaccccattgaacgggatcacccgaatcatggcgtaagccttgataatttttggcaaactgggcattaaag

SEQ ID NO: 4821 - DNA, 771 bp, Photorhabdus luminescens
  misc_feature (650)..(650): n is a, c, g, or t
aagcttgctgaatagcgttttacctatctggtatagcgcataagatagtattaatgcagcagaaaggtaataaataatcatgattactttgggaacgttatgtgcaagaaatacgtatatagagattgaacatagtgtaattaaccatgcaacgggtttcaccatagaccaaggtgtaatatttacctgttcggtataaacatctgcaaatggtttagctggaaaaaagtagccaatagccaacatgaaaataacattgagaacaaataaaatgccaaccagatgaaaaaagtgcaggtcaatttttaaaataaaattacagataatataggcagacatcccgaataataggccaagtttagcggcaataggcggcactcgtttggtcatcagaccaactaataccacgctgagaattggcgcgttaaaaattccttgtaatttgtgaatgagatagaacagaccatccggtgcattagcgactaatggtgcgacgatcatagtgattaacgctagcccgatccctagatatttactcatagcgactgtttgagtttcggtggctttttggctgattcgcgggttgaaaatattgacgataaacagtgttacagatgaattaagtccgccgctgaatgtggaaataccgnaccgaccaccaccgggtgaagaaaaccaccaatatttccggagattaaatggactaattcttgattagcgttatctggatatctatttgtcctttgaaatatggaagcattatgcctgcaa

SEQ ID NO: 4822 - DNA, 402 bp, Photorhabdus luminescens
  misc_feature (344)..(344): n is a, c, g, or t
tactgtagctgttcttgctgaaccagaagaaattgtattacctgaatcccgtacctgttcattgaacgctgaagaactgaaacctgttctggtcgctccggctcctcatacaagagccagaggtgttaaatcttaccgtgataaaacaaaaatcagtaaggtcgttgctgctaagaagccatatgtaagtatttctgactctggaacaaatactcttctgaaaacaacctcttctaaaaccccaaaaaggccatccagaatcgcccctgaacatgttaaaaggatacaggctactccacgtcaggataatatctttaaacgcttcactgctcttttagttgatnttatcagagataaatttatatgggctaaaacgaacaaaactaaagttgatattatcaa

SEQ ID NO: 4823 - DNA, 762 bp, Photorhabdus luminescens
  misc_feature (655)..(655): n is a, c, g, or t
  misc_feature (666)..(666): n is a, c, g, or t
aagctttggagatcaccctaatcgtctgccctgaacaggattcttcttaccagctcgcgatatacaacagcctgccccccgcattattgaatgccggctatttcctgatcgctgacagccagggtaaaacaactaaacctacagttaatgtgccatcacaaactgcgacttattatcctgcggttaaaatctcacaacttatgcaaacggaagatagcctgatcgcagtttcaggttatgaagatgcagcatcaaacgaagtcaaaaatctggcacaactcaaacagaaaaactcaactgtctaccaacaagctgtccaagcaatacagggcaaaatgaaatccagcagcaacactattcccgccagtgctgtcatggcgggggtctactgcgccacggatgccagccgtggtgtctggaaagccccggcgaatgtcgtgctaagcggaattagtgatgtcactgaacgacttaatgacgatgaacaaggtgccatgaacctgttaggtattaatgctattcgctatttcaacgggcgtggctttgtcgtgtggggcgctcgtacgctgcaagatgatgacaactggcgctatattccggttcgacgtctctttaacagcgcagagcgggatattaagcaagctatgcgcaccgncgtttttgaanccataaccagcctacttgggaacgggtgaagtcagccattgacaactatctctattccctatggcagcaaggggcattagcgggaaataaccgcag

SEQ ID NO: 4824 - DNA, 393 bp, Photorhabdus luminescens
  misc_feature (1)..(1): n is a, c, g, or t
  misc_feature (202)..(203): n is a, c, g, or t
natgttattctgagctgcattaaattaaagctccataattggaggatgtatggatcaccgtttactcgaaattattgcctgtcctgtatgtaacggaaaactcagttacgataaagagaattttgaactcatttgtaagttggatcgacttgcgtttcctgtacgtgatggtattcccgtcctgttagagcacgaagcccgnnaattacctctggatgaggaaaaataaggcatgttcactgttattattcctgctcgctttgcttcaacccgtttacccggtaaacctttagccgatattcacggcaaaccaatgattgttcgtgttatggagcgggcgaaacgttcaggtgctggacgtgtcattgtggcaacagataattacgacgttgt

SEQ ID NO: 4825 - DNA, 766 bp, Photorhabdus luminescens
tactccgtatccctgataaagccactcgcgacgcgctgatccgcgacaaaatcagtaacggcaattggcattcccatctgggccaaagttcatccatgtttgtcaatgcagcaacctgggggctgctgtttaccggcaaactggtttctacccataacgaagctaaactttccaattcactgaatcgcattatcagtaagagtggcgaaccattagtgcgtaaaggcgtagatatggcaatgcgcctgatgggtgaacagtttgtgaccggagaaaccatcgctcaagcgctggcaagtgcacgtaagctggaagaaaaagggttccgttactcctacgacatgctaggtgaagccgctttaactgaggaagatgctcagaattatatggtttcctaccaacaagcaattcatgctatcgggaaagcatccaacggccgcggcatttatgaagggcccggaatttccattaagctttctgccctgcacccgcgttatagccgtgctcaatatgaacgcgtcatgaatgagctatatccacgcctgctttccctgacattacaagcacgccaatatgatgttggtatcaatattgatgccgaagaagcagatcgtctggaaatttctctcgatctgttggaaaagcttctgtttgaaccgcaactggctggctggaatggcattggtttcgttattcaagcttatcagaagcgctgcccctttgttatcgatacagttattgacttagcacagcgcagccggcgccg

SEQ ID NO: 4826 - DNA, 388 bp, Photorhabdus luminescens
ttaaattgcttcctgaggagacgcggaaacaaattgccaagttgttattgaatgctgagacagaaaacagatgacagagaatagatgacggtgactgcctaatacggcttttgaggacatattatgactgataaagaaatgagttctgttgactcattgaaagcgagttttaagtctggtgttccgcctatgcctgaagcattttctcatttgattgatgaggcatatagggcatatgaaatcattgatggtgataagcgggatggcccgaccgcagggctgggacgagatgacaaaggaaaactagccctcaacactcaccattctggcgggttaaaccttgatcagagagctttggccctgtcactgaagctagaaggtgggctct

SEQ ID NO: 4827 - DNA, 568 bp, Photorhabdus luminescens
gcgagcaaaggcatcctcccccggtgctggcagcgaccggcgatccagcttaccgttaggggtcagcggaaaggcatccaaacgcacaaaagccgccggtatcatatagtcaggcaaaatatcactcaggtgctcacgcaatttggtcgccagtccgtcatccgctagcgccaccacataagccaccagacgtttatcctgaccgtcacccaacgccaataccagcgcttcacttacctcagagtgttcaaccagtcgtgcttcaatttctcccggctcaatgcggaaaccacggattttaacctgttggtcattacggccgacaaacaccagattgccgtccggcaaatagcgagccaaatctcctgcccggtacattcgggcattcgtttcatcgctaaatggatcattcaggaaacgttcagccgtcaattcaggacgattgagatagccacgcgctaccccaacgccaccaatatacaattctcccactgtgcccaatggaactggctggcggtgttcatccagcagatagagacgtttgttggcgaccgggctgccgatgggg

SEQ ID NO: 4828 - DNA, 770 bp, Photorhabdus luminescens
  misc_feature (628)..(628): n is a, c, g, or t
  misc_feature (724)..(724): n is a, c, g, or t
  misc_feature (729)..(729): n is a, c, g, or t
  misc_feature (770)..(770): n is a, c, g, or t
caattgtcgccctcaaaccaactgcaatccaagagaaagtgtattcgaacgtttgtaagacccgaatgaacatatattcgtcgtgaatgagatagacgggtaaattagttgtcatcagcatttgctcatcgttgtgtgttttcctttgctctactgcggcaataaaatgttttgctgattcgataacatattccgatgaaatataggacaacttagcccgttgtacgtatggagtcaccgcttttagagccatagcacaacgtttttcaactaaagtacgttctggtaactgatgtctaaaatttccctctgttactaacccgccaagttcaaatttgagtatatccgccgtaagcagtaacatcatacggtcaatgtgggattgcgcttctgcgtatgctttaatctctgtctggtcatcaggcatgtttaacaattcaagcgccagataagagcggtagtcataagtaccgtcgtatttatccaacaagacattcaaaaaacgtgtgacttgctcaatttcctcactgtttaattttgcgcactcttttctagtaatattcaacagctcgagaaaatattcaggaacgaaatgtttacctgtcttatgatacatgcgaacaacatnctgatatgggaaggttgctttattttccttggcaacccgcatatggtgtgaatgctaagattaatagtgattgtttctgaatcactgtaatcacanagcanactagtaaatcttggatgctcaagttctaatatatccagcn

SEQ ID NO: 4829 - DNA, 774 bp, Photorhabdus luminescens
aagcttataaagccgtggccgaagcaataggcagccaagcggttattatacgtacgatggatatcggtggtgataaaaatctgccctatatgaatctaccgaaagaagagaatccattccttggttggcgtgcaattcgtatttgccttgatcgaaaagagatcttacattctcagttacgtgctatcttacgtgcatctgctttcggtaaattacgtattatgtttccaatgattatttctgtagaagaagtacaagagctgaaagtagaacttgaattgctgaaaggccagcttcgcgaagaaggtaaaaaattcgatgaagcaatcgaagtgggagtgatgatagaaacaccagcttcagcagttattgctcatcacctggcaaaagaagttgactttttcagtattgggacaaacgatctaactcagtatactctagctgtagaccgcggtaacgagttgatttctcatctttataacccgatgctaccagcagtattgagcctgattaagcaaaccatcgatgcttcacacgctgaaggtaaatggacggggatgtgtggcgagcttgcaggtgatgaacgtgctaccttgttgctattaggcatggggctggatgagtttaatatgagtgcgatttctattccccgcatcaagaaaatcattcgtaatacgcgttacgaagatgcaaaagcgctagctgagcaagccctttctcagtctaccgctaaggggttgatagcattggttgataccttcataaagaaaaaca

SEQ ID NO: 4830 - DNA, 383 bp, Photorhabdus luminescens
ttgaacgagtagatcgaggattaattaccagtacaaaagagagtcatactgctgccgaaaaatttgccagtgaaaccaataacagttatggcgtgatggcgcatatgcatttggctcaacttgctgttgaaaagaatgaattaactaaagcagatcagtttttatctgcggctaccggccaggtaaaaaatgaggatttgcaggctctggtgaatattcgcctagccagggttcaattggcggaagataaagcggatgctgcgctgaaaacattggaacaggtcaaaggttccggttgggttggcgttgcagaggatattcgcggtgatgcactggtgaaaaaaggtgatattgctggtgcccgcgcagcgtataccaaaggt

SEQ ID NO: 4831 - DNA, 756 bp, Photorhabdus luminescens
  misc_feature (739)..(739): n is a, c, g, or t
ccagtaactaaagtgcctaattgctggttgtgggtagatggtattaataaacctaaattatggttttactcgccggtagattattggcacagcgtagaaccgctgccgactagctactggactaaagaagttgaaatgattcatctggcaaatgcaggagatattaattcagcgttaagcacttatgtaaaacagaatgttgcttacatcggttgttcaccgcaaagagcaaaagagattggtttctctgaacgcaatattaatccaaagtctgttcttgattatttgcatttccatcgttcatacaaaacagattatgaactagtctgtatgcgtgaagcacaaaaaacggctattgtcggacatttggcagcttatgaagcatttcaggctgggatgagtgaatttgatattaatatctcttatcttatggcaacaggtcatcgtgatacagatgtgccttataacaatattattgctatgaatgagaatgcggctgttttgcattacactgcattgcagcacaatgcaccttcggatattcgtagtttcctgattgatgctggtgctgaatataatggctatgcagcagatatcacccgcacttattccagcaaaagtcatattgaatttgcttctttaattaaagatatggatgctgaacaaaaggcgttattagtacatttaagtggggactcgctataccgaattcattttagatgcctatcggttgctaggngttgaaaaatatggttt

SEQ ID NO: 4832 - DNA, 386 bp, Photorhabdus luminescens
attgcatgggggcacaattggtcggccaagccgctgccgtcatacatagtgcagccctctccacagatgcagttatagaacatttccaattaattattgagcagataaaagtcgcctgcttttgcacagggagcgccgatattgctgcgctgcgtacagctgttttgctaccaacatgagtctttccgctatgactgaatatctttaatctctttcaacaaacacgaatttccgtgatgtatatgactcttgatgaggttaataactgtgtgattgtcggaggatcaacaaaatgatgtacgactgggatctgattctggtgggaggaggattggccaacggactgatcgcaatgcgtttccagcagtgtaaaccacatctgcgag

SEQ ID NO: 4833 - DNA, 794 bp, Photorhabdus luminescens
  misc_feature (325)..(325): n is a, c, g, or t
aagcttgctgaatagcgttttacctatctggtatagcgcataagatagtattaatgcagcagaaaggtaataaataatcatgattactttgggaacgttatgtgcaagaaatacgtatatagagattgaacatagtgtaattaaccatgcaacgggtttcaccatagaccaaggtgtaatatttacctgttcggtataaacatctgcaaatggtttagctggaaaaaagtagccaatagccaacatgaaaataacattgagaacaaataaaatgccaaccagatgaaaaaagtgcaggtcaatttttaaaataaaattacagatnatataggcagacatcccgaataataggccaagtttagcggcaataggcggcactcgtttggtcatcagaccaactaataccacgctgagaattggcgcgttaaaaattccttgtaactgttgaatgatatacgacagaccatccggggcattagcgactaatggtgcgacgatcatagtgatttaacgctacgccgatccctatatattgactcataggcgactgttttgagcatcggtggcattatggcttgactcgccgttttgtaactattggcgatacacagtggtcccagatgatttaagtgcgctccgtttaatgtcgaaaatttccgtcccgccctccaccgtgggggaagaaactatccaatgttggccgtagaatgaacttgactaattcttgatggaccgttatgtggatcctgtaatggacgcgctaaatttcggacagttaaccagctggtacaata

SEQ ID NO: 4834 - DNA, 414 bp, Photorhabdus luminescens
  misc_feature (37)..(37): n is a, c, g, or t
  misc_feature (54)..(54): n is a, c, g, or t
  misc_feature (155)..(155): n is a, c, g, or t
gggtattacaccgcaagcaatgattggtcatagcctnggtgaactggttgcggnctgtgtagggggtatgcttgaactggaagatacactggcattggtttgcaaatcgagcggcaatcatgcagcgccagcccacaggagcaatgctggcggtncaggcatcatctgaacgtatggttgcgctggcaccggagcgcgaatttgcatttatctactggcctgcacagtgcgtgataactggcagccatgacaatattgcaggtactggaagaacaatgcaacaaggcatgtatttcttgccagcgactaacgacatcacatgcatttcatagttcattgacggatgctgccgcacaacagatgcatggaatccaccgaatgcttgacgcctacaatccagggccattccgatga

SEQ ID NO: 4835 - DNA, 781 bp, Photorhabdus luminescens
  misc_feature (453)..(453): n is a, c, g, or t
aagctttcagggaaaagtgatactgttgagcaatttgagaaaaaaatagcagagttgttcgaagttgatgatgtagtgtgttgttctagtggaacgagcgcacttattgctagcctaatggctgaagacatttgtgctgatgatgaagttttagttccgtgttatacgacgatacctacaacgttcccgatcctatcagttggagctaagcctgtatttattgataccaaaacgtcacatacaactgaactatcgattgacgatttactaagtaaaataaatgataaaactaaggctataatagctgtccctctatggggatatccagtcaattatgatgagattgctgaagtttgtaacagtcgaggtatcattgttattgatgacgctgcgcaagctcacttcagtacatttaagactggtcgtctggttggaactttctctgattatggntgcttctcgcttcatgataagaaaatcctttctaccggagaaggtggctttatcatttctttgtctcctcaaagaactaagcgtttgcgagaaatagtccaaccttgggaacctaaatggcttgtcatttggctcgaatttcaagctaggttcactccaagccgctttaggtatctcaagatgtacacgagtgtgtgatgcaccttcctatttcgagagaaaatgcccagaaaatcaacgagggcattttgagccccatattttacaaattgtttgcctaggcatcctaactctccatcttaggctaaagataaagatctagagaccg

SEQ ID NO: 4836 - DNA, 778 bp, Photorhabdus luminescens
  misc_feature (608)..(608): n is a, c, g, or t
aagcttcctttttcgccccaatgttcgcacattgggattgataaatagcttgtttccctctttcaataaattaaattttgcattttcaaatatagcggaatttttctgctctaccttgacatcattccccaacgatttcagattaatgcctgaaatccgcggcactcttctgacacgctcacctgaactgttcgacgttggtatcaccctatcgtcagattgtcctttggcaaactttgaagtcgttaaaacgccggtattttccacgcgaatactggcatttatctgtagacgatcaaccgcttgtttagcatcatccaacgcttgtagctcttcttcggtcaatcctttgtagaattttttttcagcttccggtattaattcgggatcaatatagctaccggtttcccccgcgcctgtcgattcatagccattaccagacaaaccactaccaccggcaccggtacgatcaggttttgaatcgctctgttttgcccctctaacatcttcttgtacctgggcaattttattttcagccgcagcaatatcacgtttaccccgatattccgccccctgataggcgatatttgcattattttccgccttancggcccgttgttgttgcataatgcttcttcttttcttatttctgctttttctgagccgctgcaatatcttgttttgcactggcatgatggctgtcacttggtgctacgccgaccttcgattcctcaccgttcctttacgtgttgttggcataccgaatagcttgccggga

SEQ ID NO: 4837 - DNA, 391 bp, Photorhabdus luminescens
  misc_feature (99)..(99): n is a, c, g, or t
  misc_feature (204)..(204): n is a, c, g, or t
  misc_feature (286)..(286): n is a, c, g, or t
ataacgaattttttcgtgggcttgatattcgatctgctttaataaccgggtgatatcttggttaacaccgagtgtgttgagtgtcagcagtggggcgtntttctctacccgctgcccattctgaacatggatagcggtcacccggctctgttcgtatgcctgaattatctgagaacggccagagacaatcaggcgaccggttgnggttgcctgaacatccaacttacccagataggcccagagcaaggccatgataatgccgatactgagcgtgattgcagtgtancgggcaaaaggtgacggtggtcgttgtgacaatgctaaatgtgtcggtaaaaagtcatagtgctgcggacaagggcccaaccaggttttaattttattcttaaac

SEQ ID NO: 4838 - DNA, 779 bp, Photorhabdus luminescens
tactgtccgcgggaagctggatgttcaaaataaccgctgtattcgtcaggtacagtggttttttgtttgatcaatttgtttgatcaaatagcactgagcgcaggcccttccttcagataggggataagtagttatcggagtgtgtaaacttgacgttaaacactccgaattttttgacattaagtggatgtcccgccgtaaccgaatagcggctggcgtagccagagggcggggagataccctcttgtatgatttaaagggatttttgatgggaaaagcatctaatagaagtgcagtgtacctctttacaggaagatattacgacgataatggcggtaatcgtattactgctgttggggctggtggtgaagtttatgcttatggcggaaatgatgatgttaccgttggttcatttaaagtcgatgtataccatacagatggcgaccttacggtaaagggagtgtcaggttataccggtattcataaaacgggaaatggcgggctgtcatttacgggggctgccggtgtagctgctattgatcacacgggtgaaacgggaaatttaaattattcgggtgcggccggctataataaactggtccgtaaagggttgtctggggatactcgttttagaggggccggtggatacaatgaattttgtgatgaaactaaccggcgaaatttagatttttgttggcgcagggggcacgacatcgacattaaccttccttgtttacccagacccattattcacgtggaatttatatttatttgggcag

SEQ ID NO: 4839 - DNA, 386 bp, Photorhabdus luminescens
cctttttcgccccaatgttcgcacattgggattgataaatagcttgtttccctctttcaataaattaaattttgcattttcaaatatagcggaatttttctgctctaccttgacatcattccccaacgatttcagattaatgcctgaaatccgcggcactcttctgacacgctcacctgaactgttcgacgttggtatcaccctatcgtcagattgtcctttggcaaactttgaagtcgttaaaacgccggtattttccacgcgaatactggcatttatctgtagacgatcaaccgcttgtttagcatcatccaacgcttgtagctcttcttcggtcaatcctttgtagaattttttttcagcttccggtattaattcgggatcaa

SEQ ID NO: 4840 - DNA, 769 bp, Photorhabdus luminescens
aagctttgatggatgaagaaatcgaaacttatgagcaggagagcgagattccggcaaccagcttgatgatggttggagattctcttcctgcttttggtattgtcgctgctgttatgggggttgttaatgctttggggtcggcagatcgcccggcaggagaacttggcgtgctgattgctcatgcaatggttgggacattcctcggtattttgctggcatatggttttatctcgccattggcaacattgctacgtcagcgcagcggtgaacatcttaaaatgatgcaatgcattaaagtgacattattgtccagcctgaatggttatgctccacaaattgcggttgaattcggtcgtaaaacactctacctcacagatcgcccttctttcactgaattggaagaacatgttcgccgggtaaaagcacctgttcagcaagaaactgaagaacaggtatgaaaacgcgtaacgtctcagtcattagggtaaaaagacctaaaaggaatggcatcaaacatcatggtggttcatggaaaattgcttatgctgattttatgactgccatgatggcattttttcctggtttgtggctgttggcatttcccacccacaagaatcgccccgaattgcagaatatttccgtcccccgttacaagttgcaattaattaaggggagcgtagcagtgatagctgctatcctatccaggaggagggggatatgtgcttcatcaggaatgcgatttcctgcgtcatgttgaattcattgaaat

SEQ ID NO: 4841 - DNA, 390 bp, Photorhabdus luminescens
gggtattacaccgcaagcaatgattggtcatagcctcggtgaactggttgcggcctgtgtagggggtatgcttgaactggaagatacactggcattggtagcaaatcgagcggcaatcatgcagcgccagcccacaggagcaatgctggcggtacaggcatcatctgaacgtatggttgcgctggcaccggagtgtgaatttgcagcactcaacgggcccgcacagtgcgtgataactggcagccatgacaatattgcggtactggaagaacaatgcaacaaggcaggtatttcttgccagcgactaacgacatcacatgcatttcatagttcattgatggatgctgccgcacaacagatgcgggaattcagcgcaggcttcacgctaca

SEQ ID NO: 4842 - DNA, 778 bp, Photorhabdus luminescens
aagcttaggctgaaattacccgggcatcttcctgctctcattgcaggaactgctgtgatggggatcatgaacttattcgatcaacatgttgctactattggttctgaatttagttatatattgaatgatggtacacaagggcaaggtatccctcccatcctaccgcaatttgttttaccgtggcatttacctgatatgggtgctcatcaggttgatataagttggtcaacggtttcagccctattacccgccgccttttcaatggcaatgttaggtgccattgagtcactgctttgtgccgtggttttggatggtatgaccggtaagaagcatcactcaaacagtgaattgattggtcaagggttgggaaatattgccgcaccattcttcggtggcattacagctaccgccgcaatcgcccgctcagccgccaatatcagagccggcgcaacatcaccggtttcagccattgttcactctctgctcgtgttattgactttactggcattggcccccatgctctcctatcttcctctggccgctatgtctgccttgttgcttatggtcgcctggaatatgagtgaaatacataaagttatcgatctgatcccccgtgcaccaagggatgacattattgtgctggtgctttgtatgtcgctcacggagctggtttgatttggttatcgcaactacgatcggtatcgtattagccttactgctgtttatgcgtcaaatacctaaatcactccattagtcattgccacaacgaatgtccata

SEQ ID NO: 4843 - DNA, 393 bp, Photorhabdus luminescens
catatcgggcacgagaaagacctcaggcttgcgtccagagagatattgttgaccaatgttaaataacatatttattcattggctcaataacacgggtatcccagagcggaaattgtgcaaaggtgaattgttaacgccacgcgcaacaaaaccctgcaaccactcaggggcttgatttaacaccttacgggccgatgcttctgattcaaattcaccgaatacacatgcaccggttccggtcaggcgtgacggcgcgtattctagcagccatgaaagaagctgttcaaccttacggaaacgttttcttacaagagattcacaatcatttaggtacggagcctttaataatgcggccagagggcgaattggtgtatcacgttttaattctggatc

SEQ ID NO: 4844 - DNA, 778 bp, Photorhabdus luminescens
  misc_feature (605)..(605): n is a, c, g, or t
cacgcccattgttgtactacccatctttgctccttaataggtaaggtttatctaaaattgcatgataatatctgacatgttgcaactttgtgcaaccttatgagaatcgcttgttttatttttgtgaaattaatctagttattataattaggtggatatatttattcttgtgactttatttgattgagacacattggtttaacattttgtggctaacataagggtataaccctgaaatggttaaaaagtataatttttaaagcaaataaatgtgattcagtaaacgttttttgtaaaaaatggcgttaattagttgttaaattacctgatgctaatctaggattcactgtaactttctaattggttacaaaaataattatttcaatttagaattatggaccatttttaggtgcaatcaggtgcaacgttcctgaacctgacagggaaaactctgtgtacccgggagaactgcggatttgcaaaacacagataacactatggagaacttgcatgacagtaaatacaccaatgctaatcacctttattgtctacattactggaatgttgttgataggttttttggcttatcgttcaactaaaaattntgatgactatatcttgggaagaaggcgattaggtagcgtggtaacggctttgtctgccggtgcttcggatatgagtgggtgggtattaatgggcttacctggggttgtctattttgcggggatttcagaaagctggatagccattggtcttgctttaagtgcttaccctgacg

SEQ ID NO: 4845 - DNA, 386 bp, Photorhabdus luminescens
gttatatcaccattatctaaaacatcctcgccagattgttccgcaataaaattagctatgacggctgatatagttgatgattgatccaacgccttatttaacaaatgagagtgaacatcatttgaaggaaactctgtctgcaaatccgaacttattttatatttctcttgactcactatgtttttattattaataacagagagagctttaaaatcattcttgggactcatatgtcctccttgaattaaataacattatttcgcaactcacatcaatcaaagtctttacctcggctgttccggccattcaatatcgggagacaatgaaatatttactctattgagcattaccctatattttctccatgtcagtaaggcggatttttc

SEQ ID NO: 4846 - DNA, 569 bp, Photorhabdus luminescens
cgcgccgggtatcgatcaacgctaaaaaataccgtggcgatgcagcgctttcgcatcctccggtaccggggtgatagcatcccaaagttcagccactttgccgtcctcaatgcgccatagctcgaagtaactatgacgcgctccggcaatactcccttccgaatgagtcagaacaaactgcccatcggctaccgtacggtgaattttagtgtaatgcagcccctgcccttcatctctgagttgctcaagaaacgagataactgccgccgtaccatcgggaatatcggggctgtgctggcgaaacaattcaccattagtgtagtttccaaactcttcgtagtgaccctcgatcagggtacgtgtaaaaaagttgaccaccagttcgcgattcttctctcggtcatggtcatcgcctgcttcagtcgggccgtctaactgagtccggccactgacgttgggtgcagcctgcggcaccaggccgtcccagtgctctacgattaagccgtcggcaacccggtacagatcgaaaccgaccaacggccagtcgtctaatcccgtaaaacgaccgt

SEQ ID NO: 4847 - DNA, 646 bp, Photorhabdus luminescens
  misc_feature (557)..(557): n is a, c, g, or t
attgatcgcatccggggttcggtcaaaaagcagcttttcatcgctactcatagtagtttgattgcaactcggttgaacctcaagaaagtactaatattgagcgaagaaaacttgtcccaaccaacttctctcaaagatctcagtcagagcacagccaatttcttcatgaaggctcccgacaacaatgtgctggaacttgcgttgtgtaagaaggctatccttgtggagggagatgctgagtttatcctcatggatgccctctataaaaactgcactggaggtgcaagtactgataccgatggtatctatgtaatctctgtcgatggaacaagtttcaagcgttatcttgagctagccaagttgcttggcatcaaggttgcggctatccgtgacaatgacggggactacaaaagcaattgtgttactaactatgctgacctcatttcagattctgtgcagattttcgcagacgctgacgatgctcggtacactttcgaggtttgcatataccaagataatacgaccatttgtgaaggtcagttcgcagcaggtcgaanaaagcttaccgtagaagaatatatgttaaaaaacaagacggaagctgcattcgaattgctcgaacaaagggaaccgaacttgtcgcgcc

SEQ ID NO: 4848 - DNA, 695 bp, Photorhabdus luminescens
  misc_feature (647)..(647): n is a, c, g, or t
  misc_feature (695)..(695): n is a, c, g, or t
tggtcaacgcaatgttgccagatgcagtacagagaggatagtttgaagcgcaattttttgctgtcaaatcatgtgggattacaggagtagggattaatgtctaataacctggcttatcactatttgccggaagaggtccataagtggccgggattaccactttcgttaagtggtgaagaagtgatgccgttggattaccgagcgggtgacagtggttggttgatatatggccgtggcctggataaacaacgtattagtaattttcaacatcggcttggcgctgctattgtcatcgtttcttcatggcgtattgatgattatcaggtagtacgtattgccggaaatttgactgctcgtattaaacggctagctgatgagtgtcggttagatgtggttcccttggggcagatcccacggttgcggtcaccaggtttgctggtgatggatatggattcaacagcaattcaaattgaatgtattgatgaaattgcccgtttggctggcgtaggtgacaaagtggccgaaattactgagcgggcaatgcaaggagagttggatttttctgatagtctgcgagagcgagttgctcagttggcaggggctgatgctgatattctgcgacaggttgtagaaaatttaccacttantgccgggctgaccagtctggtgcgtaagttacaatcctttgattggcn

SEQ ID NO: 4849 - DNA, 750 bp, Photorhabdus luminescens
  misc_feature (136)..(141): n is a, c, g, or t
  misc_feature (144)..(144): n is a, c, g, or t
  misc_feature (151)..(151): n is a, c, g, or t
  misc_feature (161)..(161): n is a, c, g, or t
  misc_feature (167)..(167): n is a, c, g, or t
  misc_feature (170)..(170): n is a, c, g, or t
  misc_feature (318)..(318): n is a, c, g, or t
  misc_feature (320)..(320): n is a, c, g, or t
tgatgctgtggatactcatacatggactagcagcatcttacacctggtatatatagaggatagtgaatctcgattcgtctatgctaatgatgttgcactctattacagcgatcttcctaagggttttaacatagannnnnngcntgatagngaatgtccanctccgnggnctgaggttgcagatattatacaagcttactattttatgtgatgccgacactcaaagccatccatatactaagcaccttcattgatggagggaaagaaaaactgatccagccgctgctagctgatcttacaccgctaataaaggcatgncngtcacgggactgaatatgtgctcaccttatcgccttctgatatttcatgccctgaccccgacttatgcacccccgtccctctgaccctttagcctacccccgacccacttcattatctaccccctgcgagtacggtcccccccccccaccctccaatcgctgcccgccagagactaatcaccatacctcatgttgccaatcccccccaccaacctcgtccctgtgctcctacccccacccacacccactctcctccggcccgcccaattcctcttctttcatcccgcgcacccttctccccctctcctcgagtcccccacattcccttcgacacgccccccgtaccctccccccttctcgctcccgcgtcctccgcgctttccgccctctttctctctccccctcctcgcgccgctaccccccatccccg

SEQ ID NO: 4850 - DNA, 695 bp, Photorhabdus luminescens
  misc_feature (415)..(415): n is a, c, g, or t
  misc_feature (417)..(417): n is a, c, g, or t
gcagcgttttcacaactttgctctggcgtggcataactcatgaagggcatatcggcaatgataaaagtataaggtgttccggcacggacacagcgagtatgatagacaatatcttcaaccgtcactggaatggtggtatcagccccttgcacagtcatacccagtgagtcaccaaccagcatgacatcgataccttgctcggcaaacaggtgggcaaagctggcgtcataagcggtaatagtcgcgaatttacgtttttctttcttgagctgattcagatcagtcatggtcattggtttcattatctatcttccttctcctgcaatttttcttgttatgtacagaaatcggccgcggactgaactgagatccctatatgtagtgattagaatcagaggactgcggttgcagccanantgccaagcccgtttctgggatgtgtttcaatctttcagataaagcttccccatcaggaaatataagatcaggggcaatttcagctaacgggtagagcataaattcgcgctgttttagtccgtagtggggtaccgttaagcggtccgtattaatcacttgatcacccacaagcatgatatccacatcaggtgtttttgggcccccaaggtcattttttcttacccgcccttggggcaaatccaacccctaagggtgattgataaatcctcccgggcttc

SEQ ID NO: 4851 - DNA, 704 bp, Photorhabdus luminescens
  misc_feature (5)..(5): n is a, c, g, or t
cctgncggcaactgacccggggactctctagagtcaacctgcaggcatgcaagcttgatgtattcagttttggtgaatcgcaacagtgtttggtggaaagcattgacttactttatcgtaattcatggaatgaagtgaggaccttacactttagtggtgggcaatctgtgctggaagcgttgaagaccatactgggcaaaatgcatcaagatgctgcgccgccagcggcggttgaagtgttctgttacagcgaacatttacgagggcttattcgaactcggatccagcaactggtatctgaatgtattgaattacgtttatccagcaatcgtcaggacccaggtcgttttaaagcattacgtattgccggccagacttgggggctgttctttgaacgtcttaacgtatctgtgcagaaattggaaaatgccgtggaattctatggggcaatctctaataacaaattgcatgggttgccggtgaaaattaataccaaagagacacatttacccgcggtggttgatggctttgccagtgagggtattattcaatttttcttcgaaaatacgcaagataatcaaagttttaatatttatattctggatgaaaccaaccgggtagaaatttattctcattgcgagggaagtaaggaagaattggtacgcgacgtcagtcggttttattcttcatctcatgatcggtta

SEQ ID NO: 4852 - DNA, 823 bp, Photorhabdus luminescens
  misc_feature (762)..(762): n is a, c, g, or t
  misc_feature (764)..(764): n is a, c, g, or t
  misc_feature (781)..(781): n is a, c, g, or t
actgagggtacatactttatgctttcggctcgtatgtcgtgtggaattgtgagcggataacaatttcacacaggaaacagctatgaccatgattacgccaagctatttaggtgacactatagaatactcaagcttttgataaagtggtcgatactgctcaggatgcctatcgattaatggcacagaatccctattttgaacttattcattatccagaattaagtactttggttttccgttttattcctaaacaaaaattacctgatgcggatattgatgccatcaatgcggccattcgtaaggcactattccgtgaaggtaataccgttattgcgggtaccaaagtcaatggcagacaatatctgaaattcactttcctcaacccggcaacaagccaacaacatctacaagaaattgtgcatagcatcgtaatgcacggaaacgattttctggcaacacataataacaactaatgagattaatattattcaccaggagaaattatgataactcgcccttatgattttattgccattggaataggtccttttaatctcggactggcttgtttaactcagccattaaaagatgttcatagcctgttcattgatcaaaaaccgggctttgattggcatccgggaatgatgctagaaaattccaccatgcagaccccttttatgtcagatctggtgaccttagcatctcccactcatccacttagcttccttaattacatcaagcagaaagggagaatatactctntntatatccgggaaagttntttcctgatgcgtaaggaatataaccaatattgtcagtgggc

SEQ ID NO: 4853 - DNA, 642 bp, Photorhabdus luminescens
tatcatgtattttattacggccagaaagcccattacggcgttgcactgttaacgcgccaggtgcctcttgcggtgtatcgtggttttccaggggatgatgaagaggctcaacgccgggttatcatggcagaagtggaaaccccacacggattattgaccgttattaatggctatttcccacagggagaaaaccgtgaacatccagtgaaatttccggcaaaagagaaattttatcaggatctgcaaaactacctggagcaaaacttaacccctcaatcacacgtgattatcatgggtgatatgaatattagtccgaccgatctggatatcggcattggtgagaacaaccaaaaacgctggttaaaaacaggtaaatgttcttttctgccagaagagagagattggatggatcgcctgaaaaactggggtctggttgatacattccgccatctcaatcctgaatgtaacgaccaattttcctggtttgattatcgttccaaagggtttgatgataatcgagggctacgtattgatttactgcttgcaagtaagcctttgatggatcgctgtatcgcaacaggtattgactataaaatccgtgagatggaaaaaccgtcagatcatgccccagtttgggcagaa

SEQ ID NO: 4854 - DNA, 685 bp, Photorhabdus luminescens
tactgatgaaaatacaggcgaaaaaacagtaggttaaccgtttttagtattgcggccataatcttagtttatgcgaaaaatcgtttcagctaattctgaaaaataatgaggaaatatcaatggaactggatgatctgttatctgtaatgacaccagaaatatatcaacgcttggttcaggcagtagaactgggtaaatggcaggatggtgtgcctctaacggtcgagcagaaagagaatagtttacaaatgattatgctatggcaatcaaggcataaccatgatccgcaacatatgacgattggtactgatggtcagttggtgatgaagagtaaacaagaactgaaagcgatctttcggtctaaaatggtggcaacattcaagccataatctttggcaaattaggtatgaaaaggctgagtgtgtaaaactcagcctcgccttggattgatatcagagaagagcatcttctagttgagcaagttctatcaatatagcgccttgctcttttagctcttttaaggctgattggctatcatttggactcaggttaacccctcgacagccatccgtaatgacccaggtttcataacctaatgccagcgcatccagcgcggtaaatttcacacaatagtcagtggcgataccaataataaacagacgttcaatttgctgggtttgcacca

SEQ ID NO: 4855 - DNA, 644 bp, Photorhabdus luminescens
atgaggcttatggagaattgctccacaataagacattttgcgtgcgggtaaagcgccgaggtaaacatcaatttacttctaatgaagtagaacgctatgttggtggtggtttaaaccagcatattgaatctgcaaaagtaaaactcaatcatcctgatgtgactgttaatctggaaattgatcaagatgtgttgattctggtaaaagcccgctatgaggggattggtggttttcctatcggaacgcaggaagatgtattgtctctaatttcgggaggttttgattccggtgtttccagctatatgctaatgcgccgtggctgtcgtgttcactattgtttcttcaatcttggcggttctgctcatgaaattggtgtgaaacaggttgctcattatctttggaatcgttttggcagttcccataaagttcgtttcgttgctgtggattttgaacctgttgtcgctgaaattttggaaaaagttgatgatggtcaaatgggggtggtgcttaaacggatgatggtaagagcggcatctaaagttgcagagcgttatggcgtgcaggcgattgttaccggtgaggctttgggacaggtttccagccagacactcactaatttgcgcttgattgataatgcatcggat

SEQ ID NO: 4856 - DNA, 705 bp, Photorhabdus luminescens
  misc_feature (705)..(705): n is a, c, g, or t
ggctttattaatcttctcccaagttactgtatcctcttcaccttcttcttcgctcttatttttggtttcaatttcaaccggcaaggcaatatggtcagagtatttactgataacagaacgcaaacgccagtcattcaggaattcatcttctccttcacgtaaatgaagggtgatctctgtaccacgggtttctttttcaatatcggcaatcgtgtaatcaccttcaccagcagattcccaaaatacgccctgatcaattgaagcgccggcagcacgagtacgtacagtgactttatcagacacaataaatgcagagtaaaacccaacaccaaactgaccaattaactggctgtctttagcctgatctgaaccaatagattccagaaaagcttttgttcctgatttagcgattgttccaagattatcgatgacttcatcacgagtcataccaatgccattatcactaatcgtgatgcatctcttctctttatcaaaagaaagacgaacgcgtagttcaccatcattttcataaagttttggaacagataatgcgcggaaacgtaatttgtcagcagcatcggaagcgtttgagattagctcacgaaggaaaatctctttattggaatagagtgaatggatcattaattgcagaagttggtttacttcagattgaaatccacgggtttcctgaccttcatactcatn

SEQ ID NO: 4857 - DNA, 651 bp, Photorhabdus luminescens
tggctaagattcgtgcatctcaatttgattttattatctctgattggaatatgcccaatatggatggtttagagttactaaaaatcattcgtgaagatgcccaattggccaagataccggttttgatggtgaccgcagaagcgaagaaagaaaatatcattgctgctgcgcaagccggggccagtggttatgtcgttaaaccttttaccgcagctactctggaagaaaagctcaacaaaatatttgaaaaactgggcctctaaggagacataatgagtgtaaatccagtcatgccaagggatgagaccattagcgccagtgaaattatcagccgtatcggccagcttacgcgcatgttgcgtgatagtttacgtgagttgggattggataaaactattgctcaggcggctgaggcaatacctgatgcaagggaacgtttggactatgttgtgcagatgacagcgcaggcggcggaaagggcgcttaattgcgttgaagcggcgcaacctcgtcagaatgagttagagtcatcggcaatatcactgaaaaagcgttgggatgagtggtttgaaaacccagttgagatgcctgtggctcgctcgttggttatagatacccggaattacctcaatacggtacctgaacatactg

SEQ ID NO: 4858 - DNA, 696 bp, Photorhabdus luminescens
gggtattacaccgcaagcaatgattggtcatagcctcggtgaactggttgcggcctgtgtagggggtatgcttgaactggaagatacactggcattggtagcaaatcgagcggcaatcatgcagcgccagcccacaggagcaatgctggcggtacaggcatcatctgaacgtatggttgcgctggcaccggagtgtgaatttgcagcactcaacgggcccgcacagtgcgtgataactggcagccatgacaatattgcggtactggaagaacaatgcaacaaggcaggtatttcttgccagcgactaacgacatcacatgcatttcatagttcattgatggatgctgccgcacaacagatgcgggaattcagcgcaggcttcacgctacaatccagtaccattccgatgatatccaatatcagtggccgttggttcagtgaacaagatcgcgataattctggttattggggagatcatctgcgtcggccagtacgcttctatgacggtattcttacgttactgaaccattatgacaatccgatcctgcttgaagtcggtccagggcgtgcactgaccagtatgctgaaagatctacagcaaacaggccaagcccagatactaaccacgatgcgccatactcgccagcaaaaaccggatgaagaggtgctgctcaataccgttgggcagttatggca

SEQ ID NO: 4859 - DNA, 650 bp, Photorhabdus luminescens
ccggacaaacactgcttgggcaacgggtgtatgcacaactggcagatattccacaggctgttgatatggttgatgtattccgtaatgctgacgctgcatatgacattgcgcgagaagctatagatatcaaagcaaaagtgctctggttgcaacttggtgttattaatgagcaagcaaaaatattggcagaggaagcaggtctggatgttgtgatggatcgctgcccaaaaattgaaattccaagattgggactcgaaaaataatatttttcagcttgtagttatttggtttctaattagtggatgaagggaccctggcaccaatatctaatgtaaacttaaggcgttggatgagaagcggtgtccgggttccaagtgttcaaaataatgtttgagttggatattgagtttacttttctagacatcttataaaatctatttttacagttattacaatatcttaaggaaaatttagttgctcttattgctgctaaattttgccagaatctacacttttattgctataagatatggtgcttttgttgtgccctagttttgacccctttttattattcaaaaaacaccctattattttaaaagaaaaataacacatctcctgacaaaagggttttttaattttttatcactata

SEQ ID NO: 4860 - DNA, 694 bp, Photorhabdus luminescens
caatttcatggggattcatattgccactcacaatcaatcgcatgtagtcagtgataaaatccatcaaatgcttatccttaagcaaacgcggatactgggtgaaaatatcactctgctgaggatgttcgatatctcgctctaatgctaagacaccatgcatgcgggattttgctaacaaccgaaaaagcaacgccatcagatccatatacatcaccttgttatatttagatctacgcatgacctttggcaaaacacgtaatgttgccttaatcgcttttccgttgttaccaacaatgaaagcaccgataccagcaccagtgataattaaaaattcagcgggttgataaagtgcgcctaaatgaccacctacaatcaggtaaccaccgattaccgcaccaaaaactacgatatatcctaaaagtactaacacgcgatatcctttagctaagctggtgagcggatgggaagttgagcagtttgaatccagaatggttgtgatttcaatacaggttacaggaggaaaaagtaaaatctgtaacctgtaggaataattttcccatttaaattcacactgcgtgctgagcaagtccatccagcagttgtgaattagtatcggcagactctgaggaaagtttacgtttttttactgcacgtgatggcggttggcaaaggctacaaacaaagctattcacag

SEQ ID NO: 4861 - DNA, 654 bp, Photorhabdus luminescens
  misc_feature (647)..(647): n is a, c, g, or t
ttgacaggcttttcataactaacgtttttttgtcaataacgttattctatccgattcatagagctgtgaattttgatcttggtgatctcgctacacacgcaaatagaggctacgtttgataatttagagagtaagtcgcttgtacctactcttggataacgagcatacataaggaaggtgatgagatcaattttgacggtgctttaagccgtactcaccgaataatctttccaattaaataaagccctaacgattaagttagagctctgccttctatcgtaatgggattttattattatttttcaagctggctatcgaaatcacgttttgtgtagccggtatagagttgacgtgggcgagcgattttcacgccaccatcatgcatttcattccagtgagcgatccagccgatagtacgggcaatggcgaaaataacagtgaacatagtggatggaatacccattgctttcaggataatgccggagtagaaatccacgttcggatacagttttttctcaataaaataaggatcgtgcagagcgatacgttcaagttccatagcaacttccagcaggctgtcattcaggccgagttcatctagcacttcatggcaggtttcacgcatgacggttgcacgaggatcatangttttgt

SEQ ID NO: 4862 - DNA, 639 bp, Photorhabdus luminescens
  misc_feature (168)..(168): n is a, c, g, or t
  misc_feature (206)..(206): n is a, c, g, or t
  misc_feature (248)..(248): n is a, c, g, or t
  misc_feature (291)..(291): n is a, c, g, or t
  misc_feature (325)..(325): n is a, c, g, or t
aaccgtttttgtatcattggcagcaataagtagttcaatattttggagtcgctttcggctttgcaagaaatggaaattaagaaaatatctcgatggtgtgtcgatatgtacatttgttgcgagtacatattgaaaccccatcgatgctattatgaaattttaccgcanaaatatggcacattaccctttttctgttttcagaatanaaaaataaagccggttacccggctttatttccttatctattncgttgcttgatagaataggtttatgggatgactataacactangatctgttaacgaacattcaatgtttgatactangggtgacagcaataaatatttactggcgagtttttttgatttatcaaacaaagaaacttttattaaccttagagaaaatttttccccttccactccttcttttaacggaattatccctcccttgggtttcaaaagaaatttctttacagaatgcttccctcttttaattttcaccttttcaaacttattatcccttttgttaacctttttggttttttggtgaacattcacccggtaattttgcccaacatttaaatctgtgccccccccgggtttcacgaaaaacccccgcgttaaaaaaaataaactttcat

SEQ ID NO: 4863 - DNA, 655 bp, Photorhabdus luminescens
ttcaacccatcagaaatatgtcattatttttaatcctgtcaaccaacagtggctatcggtataatcccctttgccatatattcagcgcatttctcagggagataatcattttgaccatcaaaaaccacaactatcatatgacccgttttatcacgagcgcacctgatattcgccatctgcctcaagatatgggcattgaagtcgcgtttgccggtcgctcaaatgcaggtaaatctagcgctctgaatgctctgacgaaacagaaaagcctcgcccgcaccagtaaaacgccaggtcgaactcaactcatcaatttattcgaagtagaagaaggtattcgcctggttgacttaccgggttatggttatgccgaagtgccggaagagatgaaacgcaaatggcaaaaagcactgggtgaatatctgcaaaaacgtgaatgcctgatcggactggttgtactaatggatatccgtcacccattgaaagatcttgatcagcagatgatccaatgggcagtcgcaatgcaagtaccggttatggtgttgttgactaaagccgacaaactggcatctggtgcccgcgaaagacaacttgaatagtgcgcgagacgctgtgctcgcgcttaatggggatattcaagtagaatatttctcag

SEQ ID NO: 4864 - DNA, 693 bp, Photorhabdus luminescens
  misc_feature (507)..(507): n is a, c, g, or t
  misc_feature (656)..(656): n is a, c, g, or t
atatctttattatcaataatttcatattcattaaattctccaatagaaccggataaaaaatacgaacttttaaaaaattcaaccggttccatatgaaaacttattgtctcacccatattgaattatcctacagttttactccagagatcaaagacgctttgtctgcctgtttaatttacgtatttcccctgaatatcagtgtatacatctctttggatttaataatattgccattatccatatttttttagctatattttgtatgtgagtcactttttcgatatggtatcagttgattgatttaaatttattttatccagagcatttcttattacatcatgattaccttgatgccttgccattgcactaaccacacggcgttggcgtggcatgggtattcacccacggtaagaaagaagccagccggaagtgattccggctttttgttgtttcagagaaaaaacagaataaaatagcaaaaatatatcttatgtatatatttatcgntaatattatatttttctgtattatccctttgtttatcttattatttattttatatttttgcgattttaagctatatatttaatatataagtccaaccctgtaagatatttattttaagcataaaaataacaaagccgaaagatcacggngatctttccggctttgttaattattaactaccactat

SEQ ID NO: 4865 - DNA, 645 bp, Photorhabdus luminescens
acggcatcgctgggcggataatttcagagaaatgccggataccgctcctataccgttttgaactgttgggtactgaagaagatgtacaacgggtacgccaaggtattcaaagattctggcaacatgactcattagagaatatgtaattatgacttttcaaattaatgcacaacaagattatcatgctttaaatgccttgctcaatctgtacgatagtgaagggaatattcaatttgacaaagacaagctggctattcattgttattttcgccagcatgtaaatccaaacacactatttttccatagcctaaaagagaaactggatttcctccaacaagagggatattacgaaataaacgtgctagagcaatacgattttactgttattaaaaagctctttcagcaagcctatagcaaaaaattccgctttcaaacctttctgggcgcattcaaatattacaccagttatactctgaaaaccttcgataataaacgttatctagaacgctatgaagatcgggtatgcatggtagcactgaccctagcccaaggcgatcagatgctggcttgtcgtctagtggatgagatgatcagtggccgttttcaaccagcaacgccaacttttcttaattgcggtaagaaaca

SEQ ID NO: 4866 - DNA, 685 bp, Photorhabdus luminescens
  misc_feature (685)..(685): n is a, c, g, or t
ccagaataggttgaacttcatgggtatccagccgagaatttccctgttccagagcctgttgtatgcactgatgggcacgtgctgtgttagctgtgatgtttgctggtagtgcgggggtttctgttaattgtttctgattgcggcgatattcaaccatgtgcatgaaagcagtaatcgcgccttcaggggtgcgataagttggaatacctgcttcactgaacagacggcgggcttcttgtgaagagtattctccgcaccaattggtaaagatagttagccattttccccgtgggtgtttacggattgtttcaatgactttggttgcagtttgaatacagggagcaattgcgctaggagagtgaataagtaacagagcatcatggtcgtggctatctagtaacggttttaacgcagcgatataacgttccaccgtggagtcatcttttaaatctagcgggttatgcagagagatagtttctgggagttgtatttttaatgctttcgttgtctcttcacctaatattgcgagcttgccgttacggcggaataacgcatccagcgccattgcggctggaaagcaccattgctaacgataaatagccgttctccccgtaaaggtgacatatggcttaacgtttctacagcagaaaacatttcatgtgtatcttgtacgcgtaataacccn

SEQ ID NO: 4867 - DNA, 648 bp, Photorhabdus luminescens
  misc_feature (647)..(647): n is a, c, g, or t
cacaaattcgctcaaacccaccaccaaaactttcacgacgatgccccgtcaccagaatcatttttttattagtatcaataaacgggtaatgcttcgctagcttactccgcatagcctcatcattcattattcgatcgcgtacccacagcaacgcatcaattactgtatttccggtaacaaaaacccgattatctgcaatggattctttcaataaattattgtgggaattttccgtcggagcgaaatgatacattgccagatgccctgcaatcttacggtttgcctcttccggccaaggggaataaagatcacccgttcttaatccagcttcaatgtgaccaacagggatacgttgatagaacgctgccaaactggttgccattgttgttgtcgtatctccgtgaaccaatacaacatcaggtttaaattctgctaaaacaggtttcaatcctgccaaaatacgacaggtaatatccgttagatcttgccctgatttcataatatttgagatcaaaatcgggagtgatctcaaaaaggtgtaacacctgatccaacatttcccgatgttgggcggtgacacatactttcgcttcgaaggcttcatcccttgccaacgcgtgtactaacggagccatcttgatagcctnc

SEQ ID NO: 4868 - DNA, 694 bp, Photorhabdus luminescens
agcaccaaagagaggacacaatgcagggttctgtgacagagtttctaaaaccgcgcctggttgatatcgagcaagtcagttcgacgcacgccaaggtgacccttgagccattagagcgtggctttggccatactcttggtaacgcactgcgccgtattctgctttcgtctatgccgggttgtgcggtgactgaggttgagattgatggtgtactgcatgagtacagcaccaaagaaggtgtacaggaagatatcctggagattctcctcaacctgaaagggctggcggtaagagttcagggaaaagatgaagttattcttaccttgaataagtctggcattggccctgtgactgcagccgacattatccacgacggagatgtcgaaatcgtcaagccgcaacatgtaatctgccacctgactgacgaaactgcttctataagcatgcgcattaaagttcagcgtggtcgaggttatgtgccggcttctgcccggattcattcggaagaagatgagcgccctattggtcgtttgttagtagacgcttgttatagcccagtagagcgtattgcctacaatgttgaagcagcgcgtgtagaacaacgtaccgatttggacaagttggttatcgagatggaaactaacggtacaatcgattctgaagaggccattcgccgtgcagctactatttttgg

SEQ ID NO: 4869 - DNA, 658 bp, Photorhabdus luminescens
cggataacggctttttagcgccagttcaacgtcgttaaacccacgtttacggaagatatcacataccatatccggcacgctgatgcgctgatagacgcgcaaattatgggttaatgtcagcattttcagccagggttcaatacgtgcttgataacaaaactggccgtcgctaaaaccttgttgctgcaattcagtcaatatgccatgcacaatgcgatgattcggcgcttcgccaagacgaaatgccaaaggtttaccgatatgagactccagcttatcccagtctgcgttggaatagagctgagcagaaaatgaataaggtcgtgacaggtgctcttcaccttctattttgttcagtgccacaatatctgacaggttaccgataacctgtaaaaaacgattcttttgccctaatagcatctttttattacctgcgtttttggtttaatttgcgtagggacctgtacattcagccaaatagagacgctgaatattgctttcgccggtatcgcccaaacaaccatcccaccccaattggcggctgccatttaatatattgccttgcccgctatgctgtaccaacaattccagtgaaaaggagagcaccggtccgccgaatagcgacacacatagtgtgtcagtgtgaaatattgatcat

SEQ ID NO: 4870 - DNA, 684 bp, Photorhabdus luminescens
  misc_feature (137)..(137): n is a, c, g, or t
  misc_feature (211)..(211): n is a, c, g, or t
  misc_feature (431)..(431): n is a, c, g, or t
tcagccagccttgcttgtgcgggggtggaagcagtgcttagtggtgagcttgataatgcttacagcctttctcgaccaccgggtcatcactgtttgcctgataaacctatgggattttgttttctagcaaatatccnattggcaattgaacaggcaaaagcacgttttgatttaaaacgagtggcggacatcgattgggatgttcatcacngtaatggtactcaacatatttattgggatcgttctgatgttatgactatctcgatacatcaggatggttgtttccctccaggatacagcggtgaagatgatatcggggaaggtgaaggaaccggttataacctgaatatcccattacttgctggagccggacataatagctatatctatgcaatgacacagatagtactttctgcgctcgaacgctttanaccataactgattatagtcgcctgtggctatgatgctaatgcgacggaccctttggcaggatgcatcttcatagtgaaagttatagggagatgacccatctagtgcatcatgcagcatattgtttatgcgactgaaaactactcgttgttcatgaaggcgggtatgcggaatcttatggcccattctcgggattagctgtacttgtacagatgagcggcattcgtacaaaagtcaagatccaatgttagattt

SEQ ID NO: 4871 - DNA, 645 bp, Photorhabdus luminescens
  misc_feature (509)..(509): n is a, c, g, or t
cacaacagaataacaacttatttggtatgcgttgcggtaacaactgtaagaaaacccaaggtaaaataaaaggttattccgcctatccgactatcaatgattcggtcaaagcctatatgagaaatatgaacacccataacgcttatgaatcattgcgtgcttcacgcgccaagcagagaagccttcaggaatcactcaataccagcaaattgattgataatcttgaaggatattcacaattgggttcgacttacaacaactacctgcacaaagtatttaacagcaataaagggcttattactcaggcgcagaagttagctaaaaacgatcacgactaagagcctgagtaagtcattagcatgaatatcttgtgtttgaatatttgtgctaagtaccaaaatcatccgttaccataaccaactatggaacggatgattttcttatgtccaccggtttattcttttcattgatagaatgtttaggttaaatactataatatcactcaatcntatattgagataaaatgatttaccagagtttaatatgaatttcttttcttttgagtttcttggttcctttgttgctttctttctcttgtattggatgctacaaaaacatgcgaaaacacaaaactacctgctgata

SEQ ID NO: 4872 - DNA, 685 bp, Photorhabdus luminescens
tggcggcactgcttcctcagaatgaatacagtcgtattgttgcaacttccgtggaaggtgaagtattacattgtagaggtgagttggctgatgcattagcgcggatgcaacaaaccgagcagcttgcgcgtcgttttcatgttcatcactatgcgttgtgggcgctgttgcagcaaagtgagatcttattagctcagggatatttgcagacggcttatgaaacgcagaataaggcatttgaattgatccgtgaacagcatttggagcagttgccaatgcatgaatttttgttgcgtatccgttcacagcttttgtggtgctggtctcgtcttgatgaagccgaagaggcggcacgtcgtgggctggaagtgttgtctaacttccaacctcaacagcagttgcaatgtttaacccagttggctaaatgctctttgaccagaggggatattgataatgcccgccgttatctggcgcgttgtgaaaacctgctgagtaatgggcagtatcatagagattggcgtacgaatactgacaagctgcgagtcatcatctggcagagtatggacgacaaaagcgccgctattcggtggttggcacagactgagcggccagaaagcgtcagtaatcattttaatcagggccaggggcgcaatattgctcgtgctcagattctgcttggtttgat

SEQ ID NO: 4873 - DNA, 650 bp, Photorhabdus luminescens
tgcagaactgtaaggagaatcagcggacacctatcctgctgattgatggtattggttcaatgaatggtttaattccggttgcagaattaacgcgacagttggctgctgctggaggctatgtctatgtagatgatgctcatggtatttccattatggggcgtcatggtgcgggttatgcttttgctgcacttgaccatattttgccatccaacctcatacttgcaggttcattatccaaagcatttggtggtgccgggggttttgtggtggttgcaggtgccgatgatgtcgaagtgatcagtaccttagcgaatcctctggtttttggtcattcgatcatggtgccgatgttggccgctaacgttgcctcagcaagacttcatctcagccttgagatagacatccggcaagagcagttatggaacaacatcaatctgtttgattctctgatggagaacagtttgatgaatgcgggtgtgcaatctcccgttcgcggcgctttattcgaaaatgaagcggaagggcttgaagctgctcgtttgctgcgtgataacggcatcttattattcccggtattttatccactggtcccggatggcaatgcattgttacgctttgctttctctagtgagcatcaggcaggtgaaata

SEQ ID NO: 4874 - DNA, 692 bp, Photorhabdus luminescens
tgataagaataatcaaacagtaaacattcaccttctttccaacatctggcttcattggcaacaatgatctcacaatggctagcaggaatatcgaccgcaaaatgtaaattaagagtgaaattccataaatcacaatgcggtttaatcaccgtacctggttgcaacaccgaaaagtgaacttccaacagaggacaatgccaatcccttaattcattattaaaaatatgccacgtagcgggcaaaatattggcaaccgcgttattaggctgaccatttttaaataaatataatgccttccaatctttttgagttcccaaatagtgctcataatcggtgatatattgggactcaccgctgataaccgcgttaatttcctgttttattttatccgcattattcatcaatgaggtgactaacggctgcaactgcggaaaagaattcgtatccaaccacggcgtggtagaaagcccgggcatgatatacttggcatctgcttgtaatggcgctctttgttgtagtaaaggataaaacatatcctctactctttttaaacaatcactcccatatttttctctaattccagccaattgatcttcaaatagttctaacattataacctcctgatatctacgagcgattataactatacccttcatctttcaagctgctgctttgttggctgcgttcacttc

SEQ ID NO: 4875 - DNA, 651 bp, Photorhabdus luminescens
  misc_feature (592)..(592): n is a, c, g, or t
cacgccttttagtcgctagtggaattgataatgttaaagctatcaaaaaaacacatcgcgaaattagacgtcatttacgtaaccttgattatgttatttccacagcaacattgaaaagtaagcaaatcagagtcatccaatttagtgacttttcactaaaccatgactaccaatctcttaaaacacaagttgaaaacgcgtttaatgaatcagaatcttttaaaaaaagctgtcttgatatgtcctttcaagccataaaagggcgactaaaaggtactgggcaatactttggtcaaattgacctacaattagtatataaagcgttgccatatattttcgctgaaattcctttttacctcaatacccctcgattacttggggtaaagtattctacgttactttatcaccgcccttggtcaatcggaaaagggttatttaacggtagttatcctatacaagtagcagataaacaaagttacggaatcgtcactcaattataaaacacaaacagtctgatgaaatagtcactgcgtttaaagttaatacgctcttagtaccaaatatctttagaaaggaagcaaaataatggctnaattaagctctttcaacattcacgatcccaaattcttaaaaattcttacgatttttacc

SEQ ID NO: 4876 - DNA, 686 bp, Photorhabdus luminescens
ttgggtaatttttattttcccaaatctcttgatgaagagttttgacatcaatcactataatcaggttatacaacattgaccatagccctgatatcaaaaagtcgtgaattttttatgtaacaggatttttttctgttttttaattaataaaaaataatgtacgtcatcatgatgatttggatagtctatacccgtcatctttcaagttgcttctttgttaatggcacttgctcaccccggtcacatcgttatcgtgagtgttgtgctcctttggggggtgataaatccttataatttgtgtgattaactgcatcatggctatttaatttctgacagaatcagtaagtaaacagaattaatctcccggttttttaacttttgctaaaggaaacgggttatgagtgatattgctcttacagtgagtatgttggcattagcggctgcatttggattgtggattggaaactgtaaaatatatgaagttggattaggtattggtggtgcttctaacactaccaatgattcgtaaactgaataagcagtttggcatatcggctgcaagtctcattaatgcgtaatgtactcttgcattagccatcagtaaacgcacaaaaacacgcctattcgaggcattggatttagaaatttctgattgatagaggctgcttaggagagtgggcaaacag

SEQ ID NO: 4877 - DNA, 831 bp, Photorhabdus luminescens
  misc_feature (1)..(1): n is a, c, g, or t
  misc_feature (26)..(26): n is a, c, g, or t
ntcggtggatgcaccacatccttgcntcgtgctggtatgacgtgtggaattgtgagcggataacaatttcacacatgaaacagctatgaccatgattacgccaagctatttaggtgacactatagaatactcagtcacttattatcactagcgctcgccgcagccgtgtaaccgagcatagcgagcgaactggcgaggaagcaaagaagaactgttctgacagatagctcttacgctctgcgcaagaagaaatatccaccgtgggaaaaactccaggtagaggtacacacgctgatagccaattcagagtaataaactgtgataatcaaccctcatcaatgatgacgaactaacccccgatatcaggtcacatgacgaagggaaagagaaggaaatcaactgtgacaaactgccctcaaatttggcttgcttaaaaatcacagttcaaaaagtatgagaaaatccatgcaggctgaaggacacagcaaaactgtgacaaattaccctcagtaggtcagaacatatgtgacgaaccaccctcaaatctgtgacagataaccctcagactatccttgcgtaatggaagtgatatcgcggaaggaaaatacgatatgagtcgtctggcggctttctttttctcaatgtatgagaggcgcattggacttctgctgttgatctcattatcacatacctgcaggaagcggcggtggaagttatgcatacgctggttactttgacgcaattgatacgctctatgatgccatcgatcttcagagagacgatgtctgagccatacggattaccatactgacacagggattagtataaacg

SEQ ID NO: 4878 - DNA, 649 bp, Photorhabdus luminescens
cctttttcgccccaatgttcgcacattgggattgataaatagcttgtttccctctttcaataaattaaattttgcattttcaaatatagcggaatttttctgctctaccttgacatcattccccaacgatttcagattaatgcctgaaatccgcggcactcttctgacacgctcacctgaactgttcgacgttggtatcaccctatcgtcagattgtcctttggcaaactttgaagtcgttaaaacgccggtattttccacgcgaatactggcatttatctgtagacgatcaaccgcttgtttagcatcatccaacgcttgtagctcttcttcggtcaatcctttgtagaattttttttcagcttccggtattaattcgggatcaatatagctaccggtttcccccgcgcctgtcgattcatagccattaccagacaaaccactaccaccggcaccggtacgatcaggttttgaatcgctctgttttgcccctctaacatcttcttgtacctgggcaattttattttcagccgcagcaatatcacgtttaccccgatattccgccccctgataggcgatatttgcattatttttcgcctttttcggcccgttgtgggcgcataatgcttcttcttttcttattctgctt

SEQ ID NO: 4879 - DNA, 684 bp, Photorhabdus luminescens
tactgtccgcgggaagctggatgttcaaaataaccgctgtattcgtcaggtacagtggttttttgtttgatcaatttgtttgatcaaatagcactgagcgcaggcccttccttcagataggggataagtagttatcggagtgtgtaaacttgacgttaaacactccgaattttttgacattaagtggatgtcccgccgtaaccgaatagcggctggcgtagccagagggcggggagataccctcttgtatgatttaaagggatttttgatgggaaaagcatctaatagaagtgcagtgtacctctttacaggaagatattacgacgataatggcggtaatcgtattactgctgttggggctggtggtgaagtttatgcttatggcggaaatgatgatgttaccgttggttcatttaaagtcgatgtataccatacagatggcgaccttacggtaaagggagtgtcaggttataccggtattcataaaacgggaaatggcgggctgtcatttacgggggctgccggtgtagctgctattgatcacacgggtgaaacgggaaatttaaattattcgggtgcggccggttataataaactggtccgtaaaggggttgtctggtgatactcgttttagaggggccggtggatacaatcagttatggcatgaaactaacccgggaaatt

SEQ ID NO: 4880 - DNA, 648 bp, Photorhabdus luminescens
caatccgcactgacttactgtgggtatgcgccacggtagatcaataagaacatcggaagatttggtgattgtgaactgcctctctaaatctaaatagcgtttcataattttgctacacatggccttattcaacctattgttatatatggaattatgagtggtataatatgtagcactattttagaatcttatttagttattaaatgttgaatctagcttttgagggccgttcatctataattttattaactattcttcaaaagaataggattgaaaataactcatgtctttttatctttttttataccgcacggcataactccttttttaaatatagaaaatatttcttctaatttagcgtcttgattaaaataaatatcgataaatgtttgtcatatttaacctgttattacattcgtcatttacttcatttagaaagttatcgtattctatgttatcaactaacctttttttctttcttataagatatcattttctttttctcatattttctttgacttgatcctgggtagatatttttattctgtgaaggatatccttttctgcttttttataatcctcatgaagataaaactcggatgccaaattagagaaaaaatcactctaaaccatatagttacttggtat

SEQ ID NO: 4881 - DNA, 695 bp, Photorhabdus luminescens
atgaccgtgctctacgtcaaggtttagaggatagccagtaatgaagcgctccggcggtaatacctcatggttcggtagtaataccgtatggtttgtattgctggcagcgctgatgttaagcggttgtagcagtgcatggcaggcaacgaagaaagtcggacaggtagtctgggacccatcaactccagttggtcaacctgcgaacttaccttccaccgtcgcgatcactttgctggcagaacctgatattaaccccaataaaaatggagaagccactccggttgaaatgcatctgctctatctcagtgaagattcccgtctacttgccgctgattatgaccaactggcgagtgacaagctggataaagcactggggaaaaattatatcgaccatcaggattacaccttattgccggggcagtacaaaccactgccagtcatcccgctggaaaaaaatagccgttacatcggcgttatcgttcgctatgccgatattaatcaatccgaatggaaaaaggtcatccgtgtgaaagacacaggacagcaataccacattctggtgcatatcagagcgaacgaagttgaacttagaaaagaggagcaataactatgccaggcaagaatcgggtgatttggcgcgaaggattattcatcaagccacaacactttcaacaacaacaaaaacataatgactt

SEQ ID NO: 4882 - DNA, 644 bp, Photorhabdus luminescens
  misc_feature (565)..(565): n is a, c, g, or t
  misc_feature (600)..(600): n is a, c, g, or t
atacgtgaagtcaacttaccattacaaaacaatctattaccaaaaaacctaagtatttcggctgaaaaaattaatgccatcaaaaccgaactaccttatctattgagggaaatctatcctgttggaaatcaattacctaatgcatcggcaatcaataaaatggccctagctattgaagaaatacctaacacaccgatgccaaaatactcttcgggtaatatccaaaaaacgatacaatacacatccatagagagtaaccgcgtaaatattccccctatcgggatcacaataacaggtaatgatctctttattaatcaagtcactcacgtactagatgaaataagtgaaatcccttccggaaatatcgttattcaagagcttgaaaaacagggtttaaatatacaaccaccaacgatggatgccattgtacgcgagaaaaatggtcaattttatgcccataatagcgccggtagcagtattgcctttgacccagagaatcacttgattggcacagaagaaaaacttgtcgaggagccttggcgttcccgtgagcctgctatcgctntatatcatgagatgctacatatctattataatcgntacccaacatggtttacttctatcgataataaaataattgatca

SEQ ID NO: 4883 - DNA, 685 bp, Photorhabdus luminescens
  misc_feature (651)..(651): n is a, c, g, or t
attgtaagatccaaggattatggcgaaatcccggtgatgaaccggtatttaccagtagtcttgaactggacatgtcgacggtggaagcgagcctcgctggaccgaaacgtccacaagacagggtggctttagcgcgagtacctcaagtatttcaatcatccgttgatctagaaatgaataaatcccaggggaaagccatctcagcgccagttaatctggataaccagaagtatgagttagaagagggggctgttgtcattgctgcaattacttcttgtaccaacacatctaatcccagcgtactaatggctgcggggttgttggcgaaaaaagcggttgagaaggggcttaaacgccaaccgtgggtgaaaacctcactggcgcccggctcgaaagtggtgacagattaccttgaattggcgggcttgatgccttatctggaggaactgggcttcaatctggtgggttacggttgcacaacttgcattggtaactctgggccattacctgaatctattgaaacggcgattaagcaagctgatcttaccgtcggtgccgtcctttctggcaaccgaaactttgaaggccgtatccatcctctgataaaaactaactggctagcgtcgccgccgttagttgtggcatatgctntatccggcaacatgaaaaaggatttgactaaaga

SEQ ID NO: 4884 - DNA, 647 bp, Photorhabdus luminescens
  misc_feature (569)..(569): n is a, c, g, or t
  misc_feature (589)..(589): n is a, c, g, or t
taatgcttgcctcgatatctttcctgacgacgagacgattgaactggcggaacaagagcgattggcagaggatttgcgtttactctatgtcgcattgacgcgttctgtttaccattgcagtgtcggcgtggctccgctgataaaaggcaataagaaaaaggccggggatactgatctgcatcaatgtgctctgggctacctgttgcaaaagggggtgaaaggggatgctgattttctggcaacatcgcttaaagaattaagcggagatggcattgttatatcatcaattaatgagactgatgatcacccttggcaatcgcaaagtaaaaatgatttagtcctgtcggccaggcaatttaaacgtagagttcaggatgattggcgtattaccagttattctggtttacgaaactctgtagttcatcgtggtaatgcttccgcttattttgctggagaagaatctattgacgtgattgttcagtctattgcgccaaaacttgatgttgatgctagtggtgaaagacagttagtagaacaacctgaaatgacaccacatacattcccacggngagcttccgcggggactttnttacacgctattttggaagaacttagtttcagccaattacctgatgagaaatggttgg

SEQ ID NO: 4885 - DNA, 685 bp, Photorhabdus luminescens
atcttcttctctatctaccgcctgtatcctgacatcaatgccgggataagctaaattaaagctggacagccttggaaccaaccactggatagcaaagctaggtgaaaggctaaccgtcaaagcacctttagcacttctagcttgaagtttacgtgttgcttcatttatcgccgtgaatatctctttaatgtccagatagtagctttgaccttcttcagtcaacaatagtgatcgattgcggcgacgaaataacttcaacccaagaaaatcctccagacttttcatctgatggctaactgcggcctgcgtcacaaataattcttctgccgccttagtaaaacttaaatggcgcgctgcggcatcaaaaacccgcaacgcattaagtggaggtaaacgtttggacatgtgagcccttatgtaatgttggagataccggtaactctttatatttagttattagtttttgtaatccgaatcattataaattgtccattgaggatacaccagtaaatccctatagtggcgccacttcctaagccggaacgaaaagtgaatcagcttaacgctatgaaacttttggctttgtggttgtgatgttgtgtttgcaagttgtctgggaaaccggaccctgtagctcaagctactgttttttcacttcctgtacatttaccctgtctgtccatag

SEQ ID NO: 4886 - DNA, 654 bp, Photorhabdus luminescens
  misc_feature (654)..(654): n is a, c, g, or t
aagcttttttatacaaaaaaggaagtcaagtacttgccagctacaatatcagtggtacgacattaagcaatgatcttggtttgattgatatctcgtaatacatacaaacccaccatatttaaattgtccccctatgtacggattgaagtccaacatttgggggacagttcatgcttgcactctctcacgttccaagcctgagtacacgtttatctggcgttgctcctaatgtttcagtcacccttctacatgtacgccatcacatcaaaggtgtgttactgtttatagttatagaaaaattcttcttcgtgatttcagttacaaaaatccctttggaaaaaaatagttctgttcatcttcaataaagtactgttattttagtatagttatatcttcttatagagctccggtattaaatcattacctattattcggttggaaatatagaggtgaaggcttgagcgacgttgtattatcgaaaaaccatattaatccctttcaatctcagctggaggaacttgattcaaaattagttcctattgagggagaggctccttcagagttaaaaggtactttctttagaattggtcccggtcgcctgcataggggagacgaatattataatcatccatttgatggggatggaatgatatn

SEQ ID NO: 4887 - DNA, 700 bp, Photorhabdus luminescens
  misc_feature (683)..(683): n is a, c, g, or t
ttgcccattggcaggcaattagcccaacgccaccagcggcggcatgaaacaaaaagggttcgcccgactggatcttgtaggtacggcgtagaagataatagaccgtcagccctttcagaaaagaagcagccgcttgttcgaaggagatggtatctggcagaacagcgactttgctttccgcaacattatgtacttcactgtaagcgcctaaagttgattgtgcataaactacacggtcacccacttttatggtagtgacggcagaacccactttggtgactatgcctgcggcctcagtgcccaagccgctgggtaattgtgctggtgggtatagcccgctacgaatataagtgtcgatgtaattgattccaatcgctctattttctacttggacttcgttgtcagcaggagctctgggtgtgaattcacaatattgcaggacctcggggccgccaatagaggaaaattcgatatgttttgccatgactcaacctcatcaatgtaagggaaatgtgtgcacgtagtagttgaactcattgtgaacaggctttagtgtgttagaaataattacaaactatatgtaattactcaaggcacttcatagcgtatactcgtgcgctgttgcagatttatcagtggattattgcgggattcatggcgggaaaaaaatcaactcacaacanaatggctgaaccgaaag

SEQ ID NO: 4888 - DNA, 652 bp, Photorhabdus luminescens
tttgtgtttttgtatttcatcatccatttctaatttaatatcgagcatagccagacatccctgaacaaaactttctcccttttgcaaccgggaacgtacttcaatatcaggtactttaattaaacgcgcgatggaccgtttggaaagccttaaagcgtagtacataaataaaacttcaatttcttcagacttatccaccgtctgcaactttgcgatacaagcatcaatgatcaagccatcgttatcacagcaggaaggacgtaatgaacgagttgacgcaatcagacctttaaatccagcagcgatcggtggccaattaacaccagtggcatcatcaacccaaccgccccaacactctaaaacttgttgaatattgcgcatatattttgaccttaacttttagtaacaaatagtagtaaaaattattttcatgatggtctcatgcatccatgcattcggcattataacaaatttttcattctctatttttgtgtttctctgttacgtaactatatcatttaaatacacctatttacttagtctattaaatacaagtagtaaataacccctattcttgaccaagcttagtttcagaggaaaacacataaatatcgttattaatacggatgaccacaacgtgtttctcttccta

SEQ ID NO: 4889 - DNA, 675 bp, Photorhabdus luminescens
atcgtggctatatcttcctgcgtggtgaatatgtggaagcggctgtgcatctgcgtaaagccatcgaagaagctaaagcagcgggtttgttgggtaaaaacatcatgggcagcggctttgattttgagttgtttgttcataccggcgcggggcgttatatctgtggtgaagagaccgcactgattaactcactggaaggtcgccgagctaatcctcgttcaaaaccgccatttcctgccacttccggcgcatggggtaaacctacttgtgtcaacaatgttgaaaccttgtgcaacgttccttcaattctcgaatacggcaaagagtggtatatcggcctgagtgcaggcaagagtaaagatgccggcactaaactgatgggtttctctggtcgggtgaaaaatccgggcttgtgggagttgccatttggtacgactgcccgtgaaattcttgaagattatgctggtggtatgcgtgacggcttgaaattcaaagcatggcagcccggtggggcagggactgacttcctgactgctgaacatctggatctgccaatggatttcgaaaatattgctaaagcgggcagccgtttgggcacggccttggcaatggcagttgaccatgaaattaatatggtttcgttgacgcgtaatcttgaagaattctttgcccgtg

SEQ ID NO: 4890 - DNA, 658 bp, Photorhabdus luminescens
atcagaagcgctgcccctttgttatcgatacagttattgacttagcacagcgcagccgccgccgactgatggtgcgactggtaaaaggcgcttactgggatagcgaaattaaacgtgctcaaatcgacgggctggaaggttatcccgtttacacccgcaaagtttatactgacgtttcttatctggcttgtgcccgcaaactattgtcagtacctaatctgatttatcctcagtttgctacccataacgcccatactttagctgctgtttatcatatggcgggccaaaactattatcctggccaatatgaatttcagtgtttgcatggcatgggagaaccattgtatgaacaagtggtcgggaaaatcgctgatggtaaattaaaccgcccatgccgtatttatgcaccagtaggcactcacgaaacactgttggcttatctggtccgtcgtctgttggagaacggcgctaacacctcttttgtcaaccgtatcgccgataccacattaccactggatgaactggttgccgatccagtgacaaaggtcaagaagctggccgaaaccgacggccaaatcggtcttccacatcctaaaatccctctgcctcacaatttgtatggcaaaaaacgggccaacttcagccggttggaatcttg

SEQ ID NO: 4891 - DNA, 690 bp, Photorhabdus luminescens
atcatccggggggcggtttgcaggttatcgacaaccgtttggcggttaagactggcaatggcatcgcggtgaaaccggaggggcttgcgttaaggctacagcccaatgggggattgatgttggataaatctggggcgttgtcagtggatggtactgtagccgtttcggcacaagcttttaaattgcttcctgaggagacgcggaaacaaattgccaagttgttattgaatgctgagacagaaaacagatgacagagaatagatgacggtgactgcctaatacggcttttgaggacatattatgactgataaagaaatgagttctgttgactcattgaaagcgagttttaagtctggtgttccgcctatgcctgaagcattttctcatttgattgatgaggcatatagggcatatgaaatcattgatggtgataagcgggatggcccgaccgcagggctgggacgagatgacaaaggaaaactagccctcaacactcaccattctggcgggttaaaccttgatcagagagctttggccctgtcactgaagctagaaggtgggctctcttttgatgggggaaggcgtctgaaattagatgccgatcggcaggttcagtttgccgattttttcagtttatcgcggtgggagcggatggagatcgcacagttgttgggtttaaacgcagtaccc

SEQ ID NO: 4892 - DNA, 644 bp, Photorhabdus luminescens
tggcaagcgaacctgagattttgtgagtttaaaagaacgtccgccttcacgtcctcttgctctggccgctgccagcccatgccggaaaagcaaagttgaccaatggaatggtgataccggctaataacaacgaacgccgcaacggggaatgtttcatatttggttctcgtaactcgtaatatagataataaaaaaacgcattatagagagaaaaaattaatgtcgcactatttttaataaaattttattatggcgatttttatcattataagtattgtgtttaatctgcgatataatgttaaataatctttaatttaatgcgatggtaattataaagttcgttgttaaatagaaagtcaatatattgtatttgtgaatttcttattaaagaaattatattaaacatctattctaatcaataaggtatttatagagaataacgggttttaattttctttttctaaccaattaagtgaatcagcgataagagttttttctcttaatttacatgtttatatttattttatgtgcactaaatggaattaaccaatctctctttataatgttatggactatagctcttcattaatttagtcactttagaaaactatcaacgatgataatagatatgtcagcgtgtttat

SEQ ID NO: 4893 - DNA, 699 bp, Photorhabdus luminescens
  misc_feature (645)..(645): n is a, c, g, or t
  misc_feature (655)..(655): n is a, c, g, or t
  misc_feature (699)..(699): n is a, c, g, or t
ctttagctgactggcccgctttgggaaacctacccggagaccagaactgcgaagttgtggttatcggcggagggttgctgggtgcttccacggcattgcatcttgctgaagcgggagtggacgtgattctggttgaaaaggataacattggttcaggagcttctggccgcaacgggggacagataacccctgggctcgcacgctgggaagctaagaccatactggaaaaactttcattcgatgaggctaaacgcttatggcgttttgcctctgttgaagcgatgaatctcttggatgaactccgtgagcgttatcgtttcgaatgtgaccgcaaatatggtcatatcactgttgcagtgcacgcaggccacatggggccgctggtggctaatgccgatgcccggcgtcaactgggagatacggcgatgaaggttatcgggccgcacgaattgcaggaagagtatgtgcgttcgggcatctaccacggagcaaatatcgacagtatcggtgggcaggtccagcctctggcactgttgcgtggtctggcttatggtttcgccagactgggtgggcgaatctatgacagcacaaaagtgaagggcatcaagcaggatactggtggcacagtcgtagatactgagcggnggactatcanggcaagtaaagccgtggtgttgggtgtgcatggctccacgggtn

SEQ ID NO: 4894 - DNA, 657 bp, Photorhabdus luminescens
catcggtatgggaacggatcacacccgcaaaatagcggaactggtcaatgctggccggtaaatccatatacagggattcatttaatggtttgccagtatccagtgattcaaggatggcaaaacgtttttgttctgcttctagtaagtcagcaattttcagcaaagctgattgtctttcgattgcggaggtttgactccaggcgtggaaggctttttttgcagcgctgacagcaagatcaacatcttcagcattaccggatgcatattcagccaggagttctcctgtcgccgggttataacttttggtcgttgctttggatacactatctacccattgcccaccaataagcattttgtaggattcaacgggcaacatctctttctcaatatcgtgtaatcgtttcattaacatactccgagtactttggtttaagaatagttacatcgagaatctatctcacttaggttattttattttccattcttgttagtaaagagcggatgattccctgcatatatacccgttatccttcaagttgcctctttgttggctgcactcgctcaccccggtcacatagttatctatgctcccggcgattcactcacttgccttccgatccatatcgaatccatatggttagactgattactgacctt

SEQ ID NO: 4895 - DNA, 710 bp, Photorhabdus luminescens
  misc_feature (533)..(533): n is a, c, g, or t
  misc_feature (620)..(620): n is a, c, g, or t
tggaattaacatttgtatgcgagatgtttttatcagcaccaagggctatttctccaattttcgctgtctgtgctttttctttcatcaaattatcaatcgttgaactattttttctatcaacagcttctatcgattgatatttactcaaagacagatatgctttcgcggctgcaaactgtatcagctttgcttcactggtaggtatccctccggcaacaatttccgccgctttctgtggcgtcatctgctcatttgataacacgacatccaacggaacaccaaagaaattaccccacgcaataatcaaaccttttgctgggtcctgaccatcagggacttgcccttttagatagtgagttaaggctgcgttgatttcttcggatgttgccccagattgggccattttttgagccagtgaacccgcaccttcaaaatgtttagcgccttcggcaccaaacagacttcccatgctaagggcattattatccgcaacaacccattccattgcgaagttgacccgccaacaccgattntcccaatgccctcagccagttaccacccgttttttccaatgggcgttcaccgccggacccaaaaccccctgacgcgcttttcgcccncgaaggccgggttttcccgccgcactctggtcagtgtagcgccttcttcggcacgggcgaacgtcgcccactcgcttgggcggcggtgcc

SEQ ID NO: 4896 - DNA, 649 bp, Photorhabdus luminescens
  misc_feature (617)..(617): n is a, c, g, or t
attaataataaaggaaacctatcgaaaacccttaaggatatgggaagcagcgataccgttaaatcaactatcacatcaatggcgatgggtggcgcactggcgggttttgataacgtcatgggatgggataaagccgccaatggcgctcaaattgacccggcaaaagcgacattacctaaactgagcaatggcgactggagcaaagtggctcaacggatcgccggtcaatccattatcagttccagccttggtacagccatcaatggcggtagttttaaggacaattttaccaccgcattacttgccaatattggcagccagattaacgccgaaggtgccgggttgattggggctaacggtcaggtgttagatttacccggaaaagccattagccatgcggcggtttctgcccttgctgcggaaattggcggcggtgatgccaaaggggcggcggctggagcattagccgcagaattggccgcgataacattggataaaacattcaatgatccaatgaaaattcaggcgggtggcaaaatcatcggcagcgtcgcaggggccattgcgaccaacagcgccaaaggggctaacagtggggctaatgccggggaaattgntattctctttaaccacctgaactccatgaatg

SEQ ID NO: 4897 - DNA, 694 bp, Photorhabdus luminescens
cgtaaagttttgccgccgacaacaggtccgtggttcgagaggaggattgcgttgtgttttgcggccagcttcgcaatttcttcaccgattctttcatctcctggtggcagatatttgaccagaggcagttttccgacccgcatgacatagtagggcgtaatcggaggtagacagttacttctatccagattggataggcaggaaagggcagttaaccaaggggaatgtagatggaccaccgcatggcattcgggacggttgcggtacatggccaaatgcatggaaacttcttttgtgggtttgtcaccggatagccaattaccctctgcatctagcttactcaggcgattcgcttgcaagtcaccaaaactggagttggtcggcgtgatgataatcgtgccatcttccagtttggcgctgatgttacctgcaccgccactgctataaccccggtagaacattgaacgagcccattcgactaactctgaccttagtgcttgttcactcatgaaacatctcctgtacatgcaggaagaaatcgatattgccgaagttacctgatttcaatgccagccaataattgtgttgtcgatcgtgtacccaaggtactccgggagccatgggtgcaccgatactgaattgttggatgtccaagctttgtactatctttaccgcagtctcgccgcctgcgaca

SEQ ID NO: 4898 - DNA, 642 bp, Photorhabdus luminescens
  misc_feature (505)..(505): n is a, c, g, or t
ttacctagcaacaaggttgtgccattcacttcaccgctgataccgagtccagccagagtacggaattgttcaacttgcggcaacgtcagccctttggctttggcaagaatggctttggctaatggatggttagaaccttgttccagtgcgccagcccaccgcaatacttcttgttcactgtacccattaaaagtatggatatcagtcacttgaggcataccctctgtcagcgtaccagttttatcgaaaacaagggtatccaaggtgctggcttgttgcagcgcatccgcgtctcgcaccagtaccccgaattctgctgcccggccgacaccagagataattgacataggggttgccaacccaagggcacagggacaggcaataatcaacacagtggtaataatgaccaatgaatacataatctgtggtgctggcccaacgaaataccaaatagcgccggcaatcagggcaatggcgacaacaacaggaacaaatacggcggaanatttatctgctaactgaccgatttcgggcttactactttgtgcctgacggaccagtttaataattcgagctaatgttgtctggctgccaaccgcggcggcagtaaacagccctgtaccgtcttgcaccgtcgtaccg

SEQ ID NO: 4899 - DNA, 706 bp, Photorhabdus luminescens
tcccttgaccatattcccggcaaaatgcgccacgccattaatgaatgccggctaattcagattcgtggccgggttactcaggtcacgggtacactccttaaagccgttattcctggtgtgcggataggcgaactttgtcacttacgcaatcctgacaacacactgtcgcttttggcggaggtgattggattccaacaacatcaagccttgttgactccacttggtgaaatgtttggtatctcttcaaatactgaagtaagcccaaccggagccatgcaccaagttggcgtgggtgattatctgttagggcaagtccttgatgggctaggtaatccattttccggcggccaattgccggaaccacaagcttggtatcccgtttatcgggatgcgccggctccgatgagtcgtaaacggattgaacacccgctttcactcggtgtacgcgctattgatggcttactcacttgtggcgaaggtcaacgtatggggatttttgccgcagcgggtggcggaaaaagtaccctgctatctacgctgattcgtagcgccgaagttgatgttaccgtgctggcgctcatcggtgaacgtggccgtgaagtacgggaatttatcgaatcagatctcggtgaagagggactaaaacgttccgtgctggtggtagcgacctcagatcgcccggcaatggagcgagctaaagctgtgt

SEQ ID NO: 4900 - DNA, 644 bp, Photorhabdus luminescens
  misc_feature (560)..(560): n is a, c, g, or t
tgcttggtttacgcgatagtcacttgcttatccagatagacatcttgaaccgcattaatcagctcaataccctctttcatggattttttgaaagccttacggccgaggattaaccccataccgcctgcgcgtttattaatgacggcggtacgaacggagtcacttaaatcattattaccggatgcaccacctgagttaatcataccggcgcgacccatgtagcagttagctatctgataacggaccagatcgataggatgatcggtagttaaatcagtgtaaacacgtttatcggtatgaccaaagccaatcgccgtatagccgccgttattttcggccattttttgtttaacgatatcggcaccgatagtggctgctaaatggttagcctggcctgtgaggtctgcactggcgtgataatctaccccctctttcttgaaggcagaattacgcaggtaggcccacaatactgttaccatgcccaattcatgcgcccgtttaaaggcggctgaaatttcctcaatttgacgccgtgattcaatagagccaaagtaaattgntgctccaacggcgacagcacccatctcgaatgcttgttcaacactagcatataaagtttgatcatattgagcgggatagctcag

SEQ ID NO: 4901 - DNA, 693 bp, Photorhabdus luminescens
  misc_feature (657)..(657): n is a, c, g, or t
  misc_feature (666)..(667): n is a, c, g, or t
  misc_feature (693)..(693): n is a, c, g, or t
gatttttcttacaaactcaataatgggatagaaaaatatattttacgcgaagcattcagaggaaaaatacccgaatatatcattgacagaccaaaaataagaatgccagatggcagtggtgtaaaaaatactatcattgattacgttaaagatattaaatgcaatctaccgagaaacatggttgacagccttaattctatcggattaacccatcaaagttcattatatttcgctgaaaagtatctctctttgggttatccactaccgaaagaacgttttaaagaatctggcaaagatttttcagaatcgggttactttaatttcatatcgtaatttaaccattatacccgtcatctttcaagttgcctctttgttggctgcactctctcaccccggtcacatagttctctatgcgcccggggattcgctcctttgccgccgcgaagcatctcgaaatccatagggtatattctgttaacaatgcagctatttagcgataaaaataggattttttattttcatcacttagcgtcaaattgaaactcaatatccttttttaagaaatcataatcaataatgtcaactctcttattcttcgatacaattattcctttttcattcaaactcttaatagctctatttaattgcctgactganacacctaannacagatgctaatcttcccttttctcn

SEQ ID NO: 4902 - DNA, 647 bp, Photorhabdus luminescens
atccgctttcaccatttctggtgacaacttggctaataatgctttctgctgataagttgccggtgcctgaatgcggctatagcttggcgtaccgaagcgagctgccaacttattataatgctgctgcggattttcccctgttactgcggtcatttctgccgccagcaaacacaagataatcccatctttatctgtagaccacggcgtaccatcaaaacgcaggaaagaagcccccgcactctcctctccgccaaagcccaattcacctttatgtaacccatcaacaaaccatttaaaacctacgggtacttccaccaatttacggccaagatcggcgacaacccgatcaatcatggcactagataccaatgtcttacctatcgcaacactttctgaccattgcggacgatggcggaataggtaatttatcgcggttgccagatagtggttaggattcatcaaaccggcaggggtgacaataccgtggcggtcataatcaggatcgtttgcaaaagccagatcaaacttatcgcgcatggctaacaaacccgccattgcccaaggggatgagcaatccatacgaatgacgccatcatgatccaagtgcataaaacggaatgtctgatcaacttgatcattaaccagcg

SEQ ID NO: 4903 - DNA, 708 bp, Photorhabdus luminescens
  misc_feature (649)..(649): n is a, c, g, or t
atttaaccgcaggtcagctcctgcgtcaggctcgtgaacaacacgggctaacccagcagactgtagctgatcgcttgtgtttaaaactttctactatccgtgatattgaagaggacaatattccagccactatggtaccgactttcctgcgtggttatgttcgctcttatgctaagttggtacaaattccagaagcagaaattctggcaattctggataagcataccccggcaaaaacagcgaaagtttcaccgatgcagagtttttcgttgggtaaaaaacgtaaaaaacgcgaaagttggttgatgtggattacgtggttgattattttagtcgtaattagtttgacgggagcatggtggtggcaaaaccacatagcccaacagaaggaactgatttcgatggctgatcattccgcggctaaaattgctcagaaaaaagccagctcagaggatttacccactgaaaatcacgatcaggtgacacagttaccaacccgcgagcaggcaacaagtgagccatcaccctctgtagctgtcgctgaaaatatagctgaaaatgccgtggccgcgaatataccagtagtcatcatcaggaagtggctcaatctgtggcatcaacgcaaaatcaagcggtgaaaacacctganactcaattagctgggtacgggccacaggctcagactgctccgttgtcagctaatcaagg

SEQ ID NO: 4904 - DNA, 649 bp, Photorhabdus luminescens
tttgtgtttttgtatttcatcatccatttctaatttaatatcgagcatagccagacatccctgaacaaaactttctcccttttgcaaccgggaacgtacttcaatatcaggtactttaattaaacgcgcgatggaccgtttggaaagccttaaagcgtagtacataaataaaacttcaatttcttcagacttatccaccgtctgcaactttgcgatacaagcatcaatgatcaagccatcgttatcacagcaggaaggacgtaatgaacgagttgacgcaatcagacctttaaatccagcagcgatcggtggccaattaacaccagtggcatcatcaacccaaccgccccaacactctaaaacttgttgaatattgcgcatatattttgaccttaacttttagtaacaaatagtagtaaaaattattttcatgatggtctcatgcatccatgcattcggcattataacaaatttttcattctctatttttgtgtttctctgttacgtaactatatcatttaaatacacctatttacttagtctattaaatacaagtagtaaataacccctattcttgaccaagcttagtttcagaggaaaacacataaatatcgttattaatacggatgaccacaacgtgtttctcttc

SEQ ID NO: 4905 - DNA, 682 bp, Photorhabdus luminescens
ccgactacagcgatccaattaacgcctgatttcgaaatgggggaatttaagcgtcaggatttggtatatgaaaaagaggagctgacgatttcaggtccgggtaaatatcctgattataacttttaccgtaagacaggtgtggcaattgacggcaaatcaaaaggtgaagccgacaatgaagcgaaacctatcgacgttaaaagcctgttgccgtaaggagcgatattcatggaatttacgttttataccgctgggctgattgccatattggcaactatcagggtaattacccataccaatccgatacatgcgcttttgtatctgatcgtttctctgctggcgctttcagcggtgtttttttcgctgggcgcttattttgccggtgcgctagagatcatcgtttacgccggggctattatggtgctgttcgttttcgtggtgatgatgcttaaccttggcaaatctgttgttgaacaggagcgtgtttggttgaaaccgcggacgtggattggtccgggaatactgtcaacaatgctgcttgttgtgctggtgtataccattatcaatgtttctcatggggatattgccgacatatcacgggtgaagttgtcagtgccaaagaagtgggtatcagtttgtttgggccgtatgtattggccgttgactggctctttgctgttgt

SEQ ID NO: 4906 - DNA, 653 bp, Photorhabdus luminescens
ctgatgtagctctgattgaataggattcgaggtacaaagcacattgcgattaacgtcattcgccgtcgcgagcgaatccagcccaacttgattcagcaattgatgcgcaagttttactttcccttttaaaatgccatgaaattgaaatgtctggcggttagtcaaccggatactgccataaagggtattctcttcagcaaacttatcaatgcccaaccattgctgtggcgtaatcacgccacccggcagacggcagcgcaacattattgcatgacgtggctccagtttttgctcagcgcgttcagcacggatatcacgatcatcctgctgatacatgccatgaaaacgaatcaacaggaaattgtccccttcaaaacctcccgtcaagccattagttaaatcttcactaatcgtacctcgcagaaaattactctcctgcttcatacgctcactgtcagccagtttaccttcgacaataaaaggaccatgttgtttatcgttcattagtacacatccctctgataacggcgctcaaagcgcagttcacttaagaattcatctgcctgttcggtatccatgccgccatgctcagcaataatatccaataacgcatgttccacatcttttgccatgcggtttgcatcaccacacac

SEQ ID NO: 4907 - DNA, 685 bp, Photorhabdus luminescens
  misc_feature (596)..(596): n is a, c, g, or t
  misc_feature (633)..(633): n is a, c, g, or t
tgatatgttgcaacgcgctgaaacaacagcagtatttcagctggaatcccgtggtatgaaggatctgattaaacgtctgcgtcccgattgcttcgaagatatgatcgcgcttgtcgctttattccgtccaggtcccttgcagtcaggcatggtggataacttcattgaccgcaaacatggccgggaagagctctcatacccagatatacagtggcagcacgaatctctacagcctgtgttggagccaacttacggcatcatcctttatcaagaacaagtgatgcagattgctcaggtgctggcgggatatactctcggtggtgcagatatgctccgacgggcgatgggtaagaaaaagccggaggagatggctaagcagcgttctgtttttgaagacggtgcaaagaaactgggtattaatggcgaactggcaatgaaaatctttgacctggtagagaagtttgccggttatggatttaataaatctcactctgctgcgtatgccttggtttcttatcagactttatggctgaaagcgcattacccggctgaattcatggctgcggtaatgactgcggatatggataatacagaanaagtcgttgggttgattgatgaatgctggcgcatggngctggaaatcttaccacctgatattaatagttggtttgatcatttccacgtt

SEQ ID NO: 4908 - DNA, 651 bp, Photorhabdus luminescens
  misc_feature (623)..(623): n is a, c, g, or t
aatacccgacagaaaaagtatgatttcaaacttatccaaataatataccgcttctatgtaaagttttgcccacttatttacacgaattttcatgccaataaagtgtcagcataagttaatcggctatttgttcaatcttattccggctcatcacaatgattttaattatcgtttcatggtctataccattgtctatcattgcatacacgattttcacaagcgccagttttctacctatctgtaatccttttctgtatccttctcgatatgcttctcgatatgcttttcggcatgcttttcggcatgcttcttgatatccttcttggaacgctttctgctccagtttttgcgctattgtcaccaattacctcctcatatttctagggggcggtcccgttactcgctggacaagcccctcttctaacacgaatctttaaataccgattacggctctcagcacgaatcagtgatgtatttgttcaagttcgttctggctcaaccctgtacttttcattatcgtttcacgatcgataccattatccatcaatgcacgcgcgattttcagactcgcccgtttttcacctttctcttcacctttcttttcacctttcttttcacctttnttttcacctttctgtaatccttcttgaa

SEQ ID NO: 4909 - DNA, 684 bp, Photorhabdus luminescens
agatttatgcctctggtgatttaattgatgagcagagttcactcaatgacggcgctaaacaagcattcattaatcagcgtctgcgccagctcagccaattgcaagcggatgaaaatattgagatccatgcaggaaagattgtcgatctgagaagcatttccttgacggcggggaaagatatcacgctgaccagtggcggcacgcttgatgtgagtaaaatcacagcagaggacccctatgaatatgaagatgaacacggaacgggttatgaaaagcattatgaatatgaaaatgctgatgacgaggaagacgaacaatcttacccacaatttcaattacccatagcgagcagtatcatcactgccggcaataatttaacccttaatgctggtggtgacattattgatactgaggcaactttgtcggcaaaaggggtgactgccattgtcaaaaacaacgcagagttacattcaccgtcagggaggtataactcagttgaagggaaatatacgccagtcacttctgcgctgattgcatgtgcgttaagccatgctcctcaactgaccataaacgcctcagaagtagaaggagaagtcccagggattaaactggcggataagcaaactcggatcacctcgaaaaacaatcaccctattattcatattgcggcacctaacgcccgtg

SEQ ID NO: 4910 - DNA, 646 bp, Photorhabdus luminescens
tttatttactgctgtcagcacgttggtgatgattgccatttttgccgctctttgcttgatctttgcctgatgttttgaacgggctagatgatttaaaaattgggcagatagtttctttatctgctctttgtctttctgccaccgcttttaacaacctctacgataaataaccgtgaaaatgatgtcatctgtgtcaggatacgaagagatcaggatacatattagtgagagaaaatggtattctccgcaatatcgtgacgatgttggttatcaacgggctgttggtttaaaggaaataaaaatgacgactactattgagaagattgagcgccaaattaaagaaaacccgattttattgtatatgaaaggttctcctaaattgccaaattgtggcttttctgcgcaggcggttcaggctttatctgcgtgtggtgaacgttttgcttacgtagatattttgcaaaatccagatattcgtgcagagttgccaaaatatgctaattggccaacttttcctcagctttgggtggaaggtgagttgataggtggatgcgatattatcattgaaatgtatcagcgtggtgagctacaaacattaatcaaagaaactgctgataaatgtcgttctcagggcgaaaacgcgaca

SEQ ID NO: 4911 - DNA, 706 bp, Photorhabdus luminescens
gctatcatgtattttattacggccagaaagcccattacggcgttgcactgttaacgcgccaggtgcctcttgcggtgtatcgtggttttccaggggatgatgaagaggctcaacgccgggttatcatggcagaagtggaaaccccacacggattattgaccgttattaatggctatttcccacagggagaaaaccgtgaacatccagtgaaatttccggcaaaagagaaattttatcaggatctgcaaaactacctggagcaaaacttaacccctcaatcacacgtgattatcatgggtgatatgaatattagtccgaccgatctggatatcggcattggtgagaacaaccaaaaacgctggttaaaaacaggtaaatgttcttttctgccagaagagagagattggatggatcgcctgaaaaactggggtctggttgatacattccgccatctcaatcctgaatgtaacgaccaattttcctggtttgattatcgttccaaagggtttgatgataatcgagggctacgtattgatttactgcttgcaagtaagcctttgatggatcgctgtatcgcaacaggtattgactataaaatccgtgagatggaaaaaccgtcagatcatgccccagtttgggcagaatttgaaatttgatattccgttaacaccgaatatcaaatcgttttaaaataatggtataattg

SEQ ID NO: 4912 - DNA, 647 bp, Photorhabdus luminescens
ataccatatacccggttagccatatcccaaatacgcatacccgcgggtctacgattagtttcaaccagaaaagtttctcccgttttactatcttgcttaatctcattatggaatgcgccaaaagtctgccctgaaatcagattcattgcctgccctgctttatgtaatgcaatcgtatttctgccatcacattgcgccggaactatttgccctatttcaacaggaaattcccctttctgggaaactttttgcgttaaaaatgccatacaaccaataccatcgtacgaatattctgtatcgaaaataataagttcttctgcaagaatttgattaccaccagattgctcaacagattgagcaaaagccgttgggattttacttctatctttaaccgctaccacgcctacatttgcccgaccacaattaggcttaataatcacaccatacggaacagaatcataaaactcttctagctctttaatctcattaatgaaagtatatcgaggcgttttaatatgttgtgccgcaagcaacggtaatattcgagtttcttgttggcgaaattgatatttctcaatacctgcgaaacttaatttgggatcatcaccataaacgtttaatttcttcgcgataacagccgcataccc

SEQ ID NO: 4913 - DNA, 696 bp, Photorhabdus luminescens
tactggagcgtgatcctcagcgttttatcgaagtttatgtcctgaaaggacgtgaagatcgccgcctgacaccattgattcatgcgctggaaagcatcgggatgactatccaactggcaaatcgtcagtggctggataatcaaacggaaggtgcggtgcatcagggaattattgccaaagtgaagccagggcgtcagtaccaagaaaatgacctaccagatttactggcacaagtagaaaccccgttcttgttggtgcttgatggcgtgacagatccccataatctgggcgcttgcttgcgtagtgctgatgcagcaggtgtacatgctgttattattccacgtgatcgttctgctcagcttaatgccacggcgaagaaagtggcatgtggtgctgcggaaagcgtaccacttattcgtgtcaccaaccttgcgcgtaccttacgtttattgcaagagtacaatatttgggtggtgggtacagcaggagaagctgaccatacgctgtatcagagcaaactgactggtcctatggcactggtgatgggagcggagggggaaggtatgcgtcgtctgactcgtgaacactgtgatgaattgattagcatcccaatggtgggctctgtctcgtcgttgaatgtgtctgttgccacgggagtttgcctgtttgaggcggtgcgtcagcgtagctcgtgac

SEQ ID NO: 4914 - DNA, 649 bp, Photorhabdus luminescens
ttcttttaagtgatctatttcaaactgaataatctcaattgcaccatttgaagataaacagtgaatacgaacctgacctaatatatcctctacaaaaagatttatttttgaattaaaatccattcttattttactatgagttagatagcgaaaagataaagttttcgctaactctcttaattcccttacctttaaatccagtaggttatcttgcttcatatctccccttataaaaccgatttcttattttcaaatcacaaaaccattaacataacttatgtaacataacaaaaaaaaaccaataaagaaacaatgaacagagctatatagataaatccactcgaataacgagtggattttcacataaatagatagattaaaattattaaatcaagatacgtagcatacgacgcagaggctctgctgctccccacagcaattggtcaccgacagtaaaagcagataaatactctggtcccatattcagcttacgtaaacgccctacaggagtatccaaagttcccgttaccgccgccggagttatttaacgcatactcaattcgcgatcatttggaataacacgaacccagtcgttatgcgcagccagtaattgctcaatttcaggaatcgaaatatcttttttcaattc

SEQ ID NO: 4915 - DNA, 705 bp, Photorhabdus luminescens
  misc_feature (685)..(685): n is a, c, g, or t
tttgtctggcactgttacgcattgctctagctgataatcgcaactgtcatatcatgctatttacaacgggaattgtgcactatgaactatcttcaccagatggtctggagcaagctactcgttttctcagccaaactttcaaaggagggacagatctcgctttctgtctgacaagcacaatagaaaaaatgaaagaaaaatgttggaaaaatgctgatgctgttgttatctcagatttcattgcccagcgtctgccgaactcactaatccatcagataaaaaatctgcaactgcatcagcaataccgcttccatgcggtctccatgtcccaatatggtaagcccgatattatgcggatatttgatcatatctggcactttgataccggacttaaaagccgtttactgcgaaaatggcgtcactaacttgaattaaagcatatcttctacagtttcgcgtacttcaggtgaccagatactgcactgaacttgaccaatgtgtttcatttgcagcagtaacatcactaagcgggattgaccaataccgccaccaatcgactgcggcatgtcgcctttgagtaacgcctgatgccaatcatattgtaaacgctcttcatcactagtcagagctaactggcgctccaatgcttctgcatcaacacggatacccatagaagagatctcanacgcatcttccaaacagggt

SEQ ID NO: 4916 - DNA, 652 bp, Photorhabdus luminescens
  misc_feature (652)..(652): n is a, c, g, or t
ccgggccactagctgcgccagacaaatatgatgttgaagttaatgacatttcgtttagctatccaggtaccaatcaacccgctatccaaaatgtgtcgttttatgcgccgcaaggcagtatgaccgctattgtcggacccagtggcagtgggaaatccacactggcttatctattactctctttctatcaactggataagggagaaatccgtctgggtggaaatgatatccatcattaccaaacccaagcattgtatgacaccgtgactatggtatttcaggaaaccgcactatttcaggataccgtcgctaacaatctccggttgggtgatcccaatgcaacccaattagaactggaacaagcagctcgtcttgccaatattcacgatacgattttggcattaccacaaggatacgatactccgctaggcgtggatggcggtacgctgtctggtggcgagcgtcagcgccttgccattgcccgtgccattttaaagcaatctccggttttattccttgacgaagcgacggcttctctcgatcccgaaaacgaacagttgatacaacaggcgtttgattctcttacccggaataaaacagtttttgttatcgctcatcggctgagcacgataacccgcgctgaccagatatn

SEQ ID NO: 4917 - DNA, 712 bp, Photorhabdus luminescens
  misc_feature (690)..(690): n is a, c, g, or t
gcttaatagcttgttaatgttatcagcgcttgaacctgaccaaatataacctggttttccacagttaccggctaatcctccactgaatgtataaagataatgtgcaggattgtcccaatccgctttaatttctgcgactttgacaatgccactattggtttccgcagaaaatgcagggatgctaatcataccaatgaaaataaatagcatagatatcaattttttcatattctactcctagttaataataaagaaaatttgacgcatttgaagtgtaaattatgcaaataatctttgcatcaacttcatattaatataataggttcctagcatgataaataatgccggaagttttttcattaaaattaattaattgatataaataacatcaacattgtttaaaataataaaaacctctacctataatggttcataatcaattcaccaattaattatattaaaacaacaaaaatccattctcataacaaactatttatatcaagataattttgacgatgaagatgaaatgattaatcatctattcaaataaaataacggcgataaattatttacttgataaatatcttttaatatcgttttatctactcgacactaagaaaaaaaatttttaacaaatcacttctattaataaattttttaacgtagaagtatatatatttctggcgtatnccatacactatattaatagtta

SEQ ID NO: 4918 - DNA, 650 bp, Photorhabdus luminescens
  misc_feature (543)..(543): n is a, c, g, or t
ttgagttggagcgagtgtattactgttgcctatttggtctgtgagctgaataattcctttttctgttaatgaggcatcgcgagtttctgttgtgtttttttgttctaaggatttcttgaattgggtggtgagtttgtctatatccccattatccagaacatcttcgccagattgtgttgcgataaaattagcgacgacagtggatatggttgacgactgacgtaatgccttattcaatagttcaggggtaatatctgctgttggaaacccagtttgtaatttttgttctttttcatatgtttcttggggcattatatttgcattttcactaatagaaaaagccttaaaatcattcttttgactcatatatttttctccaattaatcagtgcattttataagcaatatagtgaatttttataaaaataatttttccctattcacgccagctatagtttagttagaaaaaagaataatggaatattcttataacttatagggttaactatttttatataattgttggtaatgaatatgttaattntttgtaattttaaatgtatctaaactatttgcatttaatatttgaaaatgatgtttattaattccatttatgatctaggggagttatgtggtataactgatttggtt

SEQ ID NO: 4919 - DNA, 824 bp, Photorhabdus luminescens
  misc_feature (698)..(698): n is a, c, g, or t
actgcaagctaccactttatgctttcggctggtatactgtgtggaattgtgagcggataacaatttcacacaggaaacagctatgaccatgattacgccaagctatttaggtgacactatagaatactcaagcttcgacaccagtggatttctccagcgcactgacattcaacaagccatcagcatctacctggaaagtgacccggatatgggccccaccagccggtaatggcggaataccacgtagggtaaaacgggccagcgaacggcaatcacttaccaattctctttccccttgcaccacatgaatactcattgcactctggccgtctttgaaggtggtgaattcctgcgctttggcaaccggaatggtcgtgttacgcgggataattttttcaaccaagccccccatcgtttccagcccaagtgaaagcggaatcacatccaacagcagcatgtcgctatctggcttgttacccaccagaatatccgcctgaatcgaagcacccacagccaccactttatctggatcaatggaagtcagcggttcgcggccaaaaaattcgccaaccctatgacgaaccaacggcacacgggtcgaaccacccaccataaccacctgtagaacctcatccgcagagacttctgcatctttcaatgcccggcgacttgccagtaaagtccgttttatcaacggngttatcagggcttcaaattcgcaacgggtgattttaccttgccagccagcaatgtttatctctgcaatatcagcatcactcaaggcgaattttacctgagtagccatatccagtagctggcgttgc

SEQ ID NO: 4920 - DNA, 646 bp, Photorhabdus luminescens
  misc_feature (578)..(578): n is a, c, g, or t
ctgcccaaggtattctactatgttcaaagaccattgggatcacaagttgttgataacgttgctgatagatgggattacttcccaactcttccaatccagctctcagttcattaatcgacgaaatctgaaactgaggatactggcggccatagcgctgaatatcctgttcaatagtttgttgtacaaaaccagcaagttgacggatatccactcctattgcattcacaatgcagtagttatcatgcagatgacgaaccagtgactcgtcatcctttctatcaatattacgcataaacacagcagtccgtctcagcatagctaccagcttttcagcttgagtgctgataatcgtcgtgcaggggaacgcttcaaccgcccgaccttttcctgttagttgcgtgacaaatgaacgaatatcgcgccgttctgccgcttgcagcaaatcagactccatcaactccagtttgataaatggcctgaggtagggaacctgtacaacacgttggggatagcggaccgaaatatcattgtagcgatattcatcccgtgtgatcttagggttgctatcgtcaatcccncaaaaaccagatgctgcaatagtcgctgatatcgtctgaacatatcctttctgatatttttgcgctga

SEQ ID NO: 4921 - DNA, 708 bp, Photorhabdus luminescens
aaagaggctggcataacgtcaagttctatgtccgcagaagatgaacttgctcgtatccttggcaagtaaatactcagttgttaaatcaagatcctgctttttaaagtgggatcttcctatcaagagatatttctatgctttccaaaatcgcagatgcatttaagagcgcattcgggggtaagacggttgcgcctgctgttccaaaggtgccggaagtattaggtttgcgtatcggtggggcacttgagatagacccactgatgctgaaactgattgaatctgacctaaccatcgaaaatgcagcttcaactcagcttatatgttccgttggtgtagtcgatctaggtgataacgtgcgtttggttcgttattacactgatgacgaaggttatcttcaagtgcttcaagaaggtgaaggggatgacggcgtgaaggaagtgagtttgtggtatttttatgaaactaaaccgatcgattcacaagctcaatgggatgcgctgattgaaaacggtatcgtgacaccaagcagacgatatgatctcgatggtacccagttctctccgttatgggacaacattaagccggtggctgttaccgaaaaaacttacagtaaagaaggtcacataaccgaaactgatcagtttgtgatggtgtatacgcgtcaggttgctcataacagaacagaagaacttcaggttgtgggagaag

SEQ ID NO: 4922 - DNA, 649 bp, Photorhabdus luminescens
cgcccgattgagcaaagagcagtcacacaaactatgaatatgagaatatgatgaatacagcgcctccccatcgggaggcttttttctgtccattgcaaacctaattattatcagaatgtaaggaacccatttatggatcaaaataatttgctgaaaatacgggaaaaagtcagcgaacttgatttaaagttactgattttattagcagagcgtcgccaattagcttttgatattgcccaaactaagttacaggataatcgccctatcagagacaaggatcgcgaacgagaactactagatgttctgattaaaaaaggaaaaagctacgggcttgatggcttttatatttctcgtctctttcagatgatcattgaagattccgtcctcactcaacaagcattattgcagcaacacctaaatcaaacaccccaagattcagcacgtattgcattcctcggtcctagaggttcctactctcatatcgcagcccgccaatatgccgcccgccatttcaatcaattaattgaatgtagctgccataagttccaggatatcttctccttggttgaaacaggccaagcggattacggaatgttacccattgaaaataccagctcgggttccatcaatgatgtttatgacttattgc

SEQ ID NO: 4923 - DNA, 690 bp, Photorhabdus luminescens
  misc_feature (664)..(664): n is a, c, g, or t
  misc_feature (686)..(686): n is a, c, g, or t
tgtgacatacagtaataaagctaagcatcagatgctcggtgtgtcagaggccgttttacagcaatatggggctgtcagtgaacaggttgtgagagaaatggcgacaggagcactgaaagccgcacaggcagatctggcggtttcggttagtggcattgccgggcctgatggtggcagcgaagaaaaacctgttggcacagtgtggtttgggtttgcctatctaacggtaaatggggtagaagttgtgtcccgccgttgttgttttaacggtgatcgaaatgaagtacgccttcaagctgtcatttattctctgaaaacactgttatcagagattatataccttattggatttcaagatgcttcaaagaggcaacttgaaagataacgggtataaaaaattaacttgatgctgtatgattatacagtataattgtaggcaacatttcagtattaaaaattattcatcggcagtgagagagccctttcattgcttacgagggagtaaaaatggctattgatgaaaataaacaaaaagcactagcagcggcactcggccaaattgaaaaacagtttggtaaaggttccatcatgcgtttgggcgaagaccgttcaatggacgttgaaactatctccacgggttcattatcactggatattgcattangtgctggtggtctgccgatggngcgt

SEQ ID NO: 4924 - DNA, 661 bp, Photorhabdus luminescens
  misc_feature (127)..(127): n is a, c, g, or t
  misc_feature (171)..(171): n is a, c, g, or t
  misc_feature (398)..(398): n is a, c, g, or t
  misc_feature (470)..(470): n is a, c, g, or t
  misc_feature (491)..(491): n is a, c, g, or t
  misc_feature (531)..(531): n is a, c, g, or t
ttatttagcttgccattcatatcaggcactaatattaaattaatgacctacaaatcaatcctggcaaatcctatatcctattactcttgaattggagagggatttgcaatacttttcagtgaatcangaataattttactgagatacatatcactaatttttggcaaattnttaacatagagatcatatggcatccagaatgacttcccctcaaatcgattattctggaatatatcattctgcacgtctgctggaatattttcccattcagcagcatcaggcgaatatggacctttatatttaacaacattccacggattatgcagtcgtactaacttaatatcattccattgctgagcatctaatattaaataagcatgacctgatactaaatccgntgatgaaccggttccttgataagtcacatgatgttttattttgaagatatcgataaatttctcatcccaaanacgatcctgattaccctgatnaatactggtatttgctgtcgattctataccaaaatagatntcattaccgtcggctaaattctcatagcttccatgcaatttcgcaaatgctttttcaatcaggtaataccaaaactcatttttatcttgcatagcagaaaaactcactcgtggcagatcattgtcgatca

SEQ ID NO: 4925 - DNA, 680 bp, Photorhabdus luminescens
ataggcatgaaaggtgtctaaatcatggcgtaatgtccccacgacgcgggagaccagatgcataacaaaagagtagcgatcaacttttgtcagatccgcgacatagcgactgcccggttcacaaatgcgggccaggtcattacgcgccaaatcaactaacattaagtgctcagctagctccttatgatctgttcgcatttccagttcggtccggctatcaagatccgcatccagctcgccggccgcattgcgcccacgggggcgggtgccggcgattgggtagatttcaatttggcgattggatgcatcatatttaagcgcgctttcaggagacgcgccaaacagacagaaatctttgtcctgcatgaaaaacatgtagggacttggattgtggtacttaagtttttgataagcatgaagtggtgccgggcagggtaaaaagaagcgtcttgatggcactacttgaaaaatatccccttggcggatgtattgttgcaactgtgccaccatttctgcatagctcttgtcatcccgattgtatgaaactttcatggttggcagagagatttgttgtactggctcaatgggctcggtaatgagtgccactaatgttttcaatcgttgtttaaggcgttgctcttctgcttgagaatcactgaaaagagagatttgccagcgtg

SEQ ID NO: 4926 - DNA, 648 bp, Photorhabdus luminescens
catgggtacgaatagtgatttttgtaatgtcattgatagtcttaccggcgtctttcaattgttgatgcagactgatcgccgcttccaccgcagtttgcgcatgaaattctgccgggaaagcgatcttgaacagcacgttttccatcacataagcgccataggcacgctggaatttaaaaggctgaccattgaacaggacatcatagaatccccacgtttttgcagttaataccgagggatatcccatttcacccttttgcgccatcaaagccaagcgaaccgcgcgggatgttgcatcaccggcagcccaagatttacgtgagccagtattgggagcatgacggtaagttcgcaatgattgaccatcaacccaagctagcgataccgcgctcaagatctcttcccgattcaatcccaacatttcagcaacaacagcggtcgaagccacttttaccagcacgacatgatctaaaccgactttattgaatgcattctccagtgcaagacatccctgaatttcatgcgctttaaccatccccgtcaaaacatctttgatcgtaagcggctttttcccaccagcaacggcatttcttgatagccagtcagccactgctaagatgcccacgaagttatcggatggatgccccc

SEQ ID NO: 4927 - DNA, 698 bp, Photorhabdus luminescens
aacggtaaactccaggcgaaaagcctgacattgacacaaggccccaaccagattgatttcaaacgcggaacccttgttcccatgacaggggaagattatggcccttgggaagcgattgataccgggttattagggggaatgtatgccaataaaatccgtctggtgagtaccgagccgggtaaggttgtcaatctgaccaacctgacggcaacccaaggcgacatcagtctgacggcggatggcaaggtgactctgggggatgtacaggccaaaacggatatcaccgttaacggtaaagacattgacatggtgaaaaaaagtcatatgcaagccggtcaacatctgatattgacaaccgatacattgcagagttggggacgaattcgtgccgacggtgatgtcactattaaagcgaaaaccttgtctttagatgggggaaatatcaccgccgggaaccaggttctgctacagggaaagaacagttttacggtgcgtggcacggatatttcaggtcatgacattaccttgattgccaatagttataatacttctgtttcacctagtgacacgtcggaaagcacacaagtattacctattatttctgcggttaatacgctgcgtattctgtctgaacagggaatatcgctttcagatacgctaattaaccgggcgaaaaatatctttatggcgagtaatgg

SEQ ID NO: 4928 - DNA, 652 bp, Photorhabdus luminescens
  misc_feature (596)..(596): n is a, c, g, or t
cggataacggctttttagcgccagttcaacgtcgttaaacccacgtttacggaagatatcacataccatatccggcacgctgatgcgctgatagacgcgcaaattatgggttaatgtcagcattttcagccagggttcaatacgtgcttgataacaaaactggccgtcgctaaaaccttgttgctgcaattcagtcaatatgccatgcacaatgcgatgattcggcgcttcgccaagacgaaatgccaaaggtttaccgatatgagactccagcttatcccagtctgcgttggaatagagctgagcagaaaatgaataaggtcgtgacaggtgctcttcaccttctattttgttcagtgccacaatatctgacaggttaccgataacctgtaaaaaacgattcttttgccctaatagcatctttttattacctgcgtttttggtttaatttgcgtagggacctgtacattcagccaaatagagacgctgaatattgctttcgccggtatcgcccaaacaaccatcccaccccaattggcggctgccatttaatatattgccttgcccgctatgctgtaccaacaattccagtgaanaaggagagcagcggtccggcaaattgccacacccattgtgtcagtttgcgatattg

SEQ ID NO: 4929 - DNA, 680 bp, Photorhabdus luminescens
  misc_feature (515)..(515): n is a, c, g, or t
  misc_feature (568)..(568): n is a, c, g, or t
  misc_feature (612)..(612): n is a, c, g, or t
tcagccagccttgcttgtgcggcggtggaagcagtgcttagtggtgagcttgataatgcttacagcctttctcgaccaccgggtcatcactgtttgcctgataaacctatgggattttgttttctagcaaatatcccattggcaattgaacaggcaaaagcacgttttgatttaaaacgagttgcggtcattgattgggatgttcatcacggtaatggtactcaacatatttattgggatcgttctgatgttttgactatctcgatacatcaggatggttgtttccctccaggatacagcggtgaagatgatatcggggaaggtgaaggaaccggttataacctgaatatcccattacttgctggagccggacataatagctatatctatgcaatgacacagatagtacttcctgcgcttgaacgctttaaaccagaactgattattgtcgcctgtggctatgatgcgaatgcgatggaccctttggcaaggatgcagctccatagtgaaagttntcgggagatgacccagctagtgcaacaagcagcagatagtttatgcgacgganaactagtcgttgttcatgaaggcgggtatgcggaatcttatgtnccattctgtggattagctgtacttgaacagatgagcggcattcgacagaagtcaagatccaatgttaa

SEQ ID NO: 4930 - DNA, 650 bp, Photorhabdus luminescens
ataaccctgatgggttggttcagcgtacggttcgtgcgttgaaagatgccattcctgagctaggattgctgactgatgtggcattagatccattcactacacatggtcaggatgggatcatcgatcaagatggttatgtgatgaatgatataaccaaagagatcttggtcaaacaggcattgtcacatgcagaagctggtgctgagattgtggcaccgagcgacatgatggatgggcgtattggtgcaatccgtgaactatttgaaacggaaggacatgtaaatactcaaattatggcttactccgctaagtatgcttctgggtattacggcccattccgtgatgcaatcggttcaaatcgtaatctgaaagggggcaataaaaaaacctatcagatggaccctgcgaatagtgatgaagcattgcaggagattgcacaggatttgcaggaaggcgctgacactgtaatggtaaaaccaggtatgccctacctggatgttattcgcagggtaaaagatacatttggtgtaccaacctttgcttatcaagtctctggcgaatatgccatgcacatggctgctattcagaatggttggttacaggaacaggtaattgtggagtctctgttatgcttcaagcgtgcaggagcc

SEQ ID NO: 4931 - DNA, 699 bp, Photorhabdus luminescens
ttgtcgaagtaccagccagtatagcggctaaggttttactgttgaatacgatgcttcaaacaagaacaagcaacgcagaacttgcacggttactgggaactcgaccgcaagaaattcaacgtatagtgtcattaagtcatagcactaaaattgacactatcgcgaatgcgttaaatgccttgggtaaacatctggaacttgttgccatttaaacatcaccatcaaatagtcttaaaccttgccgtggcaaggtttaagtaaataaatttaaattacagcttcattaccatttatctcgatagtcaaatgatattttataccaatatttatctgtttcaattttatttttaaaacatgattcaagtgttggcacccattctttttttacatcgaacgcaccattattaatattatcttcaatagtaagccctaatttttctattactgaaccatcatctcccagatctccagaatattcctcaccaataaactctgccgtttttttatcaaaccacgcaatatttaactttaaccccataattcacctcataaataacttttcataattataatacactcactctttttattctctgctattcctgtagagacatgaatttaaaaacgttttcactttctcaagcaattgccacatatactgacagccatgatttcgtgtcaccgtttcatgtaaggatt

SEQ ID NO: 4932 - DNA, 646 bp, Photorhabdus luminescens
acgaatgggcgaagaaaatctcagaacatttactgccacgtacccgtgcttatgctgaactctggttggataaagaaaaagtcgcaacgaccgatgaagagccgattcttggctcgacttatttgccgcgtaaattcaaaaccacggtagttattcctccacagaatgatgttgatctgcatgccaacgatctgaattttattgctattgcagaaggtagcaagttggttggttttaacgtgttggtgggtggtggtttggcgatgactcacggtgataaaaatacctatccaagtatggcgagtgagtttggttatatcccgcttgagcatacgttggcaattgcggaagctgtggtgacaactcagcgtgattggggtaaccggactgagcgtaaaaatgccaaaaccaaatatacgttggagcgggttggtgttgagacttttaaagcagaggtagagagacgcgctggcgtgaaatttgaggcaatccgaccttatgaatttactggtcgtggtgatcaaattggctggctgaaaggtatcgatgataaatggcatttgacactgtttattgagaatggtcgccttttggactaccccggcaagccgctgaaaagcggtgttgctgaaattgccaaaataca

SEQ ID NO: 4933 - DNA, 688 bp, Photorhabdus luminescens
  misc_feature (630)..(630): n is a, c, g, or t
  misc_feature (688)..(688): n is a, c, g, or t
gtgcgataccataacgaaagaattgattcacaaacttaactaagactactgcatgattaatacagaaaccttcgacacccacacgcccatgatgcagcaatatctccgtcttaaagcacagcatcctgatatcctgctgttttacagaatgggggatttctatgagctattttatgacgatgccaaaaaggctgcaaaattgctggatatttccctgaccaaacgaggtcaatccgctggcaatcctatccctatggcaggcgtgccacatcatgcagtagaaaactatttagctaagctggttcaattaggtgaatcagtcgctatctgtgagcaaattggcgatcctgccaccagcaaaggcccggttgaacgtaaagtcgttcgcatcgttactcccggtaccgtgacagatgaagcgctattacaggaacggcaagataatctgctggcggctatttggcacgataatcaaggctttggttatgccacactggatgtgacatctggccgcttccaaatatctgaaatgatagagctggaaacgatagccgctgaattgcaacgtagccgtcctgttgaattactctatcctgaaagttttgagcatatggcgctaattgaaaattntcatggcctgcgccgtcgccctttatgggaatttgagctagataccgcaaaacagcan

SEQ ID NO: 4934 - DNA, 649 bp, Photorhabdus luminescens
ttggtaaggtataacgcccttccttaacatgggacaggtaggtattataacctgcaacaaatccatcaataattacctgtgaatcagcacttaattgcggccatttttcacgcgcctgttccaccaaagctaacgttttataaccgaagtcctgaattaaattcagtgagtccccctgcttatctctatcagcaccaaagaaacgcgcacgctcccctctaatgcgcacataatcatccgccataatgcatatattatcttgtgcctgagcataggcattgccaaaactcaagcttcccaagtcgtgtgcataaatatgagggacaccataatgagtacgaacaattttcgcttcaaatgctgtcttcgtcttttctgaataacttttaaatccgctacaacttattgttaataaggtaatcaacagtaatgtgattgatttaaatgatattgttttaaataatattgttttaaatgatgtcatttttattttgcccttaaagtacctgtataaaagtaatctctggctttgaattttgattccaatattaatgctctgagtaaccaacgatcataaccatcgtatcgaggttcatactcgctgcgtgcatgagcaactttacggttatcaaatagcaacatgtctcca

SEQ ID NO: 4935 - DNA, 692 bp, Photorhabdus luminescens
gcgatttggccctgttgccgccggaagagcaggattacctgttgcaccatttgaaccagacagcggtagagtatgaccgtagccgatgtattcatgagtggatagaggcgtttgctgaacaaacgccggatgctattgcgttggtctttggtgaccaaaagctgacttatgcgcaacttaatgccagagccaatcagttagcacatcaattaagagctcagggagtttcaacgagtgggcgagttgctgtgttgttgcaaagaagcatcgacatgatcaccgcactattggccgtgatgaaagcaggagctgcgtatgtaccggttgatcccagctttcctgtcgacagagtgcagtacatgctgaacgatgcagagccacaatgtattataagcaaccgcgaatatgcatcacgatcagttggttttgcggaattaacctgcttactggatcacattgaccttagccaatcacccaccacaaatattcctaaacagtcgatcggtttagctgcatctgctctggcctacgtgatttacacttcgggttctacgggcaagcccaaaggtgttatggtcagccactcggcggttaataacttcttgatctcaatgcaagataacttgcagtgtgtggcacaggacaatattttagccatcacgacgatttcctttgatattgcagtgttagag

SEQ ID NO: 4936 - DNA, 644 bp, Photorhabdus luminescens
tcaattccaatgaacctgccaaacgtctgttatgtcagggcatggttctagccgatgctttttattatatcggcaaaaatggtgaaaaaatttgggtttccccggctgatactatcgttgaacgtgatgataaaggccgtatcgttaaagcgacggataaagaaggccatgagctggtttataccggcatgagcaaaatgtctaaatccaaaaacaacggtattgacccacaattgatggtagaaaaatatggtgctgataccgttcgcctgtttatgatgttcgcggcaccaccagagctgacgctagaatggcaagaatccagcgttgaaggagcaaatcgctttttgaaacgtgtgtggcgcttggtttatgaacatagcagtaaaggggcaactcaaccactggatatcacaaacctgacagtggaacaaaaagatctattccgtgacctgcacaaaaccatcgctaaagttacagatgatgttggtcgccgtcaggcattcaatactgctatcgctgcggtaatggaattgatgaataaactgacccgcgcaccacaggaaactgagcaagatcgcgctctgatgcaagaggcactgttggcggttgtccgtatgttgtcaccaataactcctcatgct

SEQ ID NO: 4937 - DNA, 693 bp, Photorhabdus luminescens
ccagaataggttgaacttcatgggtatccagccgagaatttccctgttccagagcctgttgtatgcactgatgggcacgtgctgtgttagctgtgatgtttgctggtagtgcgggggtttctgttaattgtttctgattgcggcgatattcaaccatgtgcatgaaagcagtaatcgcgccttcaggggtgcgataagttggaatacctgcttcactgaacagacggcgggcttcttgtgaagagtattctccgcaccaattggtaaagatagttagccattttccccgtgggtgtttacggattgtttcaatgactttggttgcagtttgaatacagggagcaattgcgctaggagagtgaataagtaacagagcatcatggtcgtggctatctagtaacggttttaacgcagcgatataacgttccaccgtggagtcatcttttaaatctagcgggttatgcagagagatagtttctgggagttgtatttttaatgctttcgttgtctcttcacctaatattgcgagcttgccgttacggcggaataacgcatccagcgccattgcggctggagaagcaccattgctaacgataaatagccgttctccccgtaaaggtgacatatggcttaacgtttctacagcagaaaacatttcatgtgtatcttgtacgcgtaataaccctgctcgct

SEQ ID NO: 4938 - DNA, 839 bp, Photorhabdus luminescens
  misc_feature (1)..(1): n is a, c, g, or t
  misc_feature (77)..(77): n is a, c, g, or t
  misc_feature (585)..(585): n is a, c, g, or t
ntcgctaagctacgactctatgctctcggctggtataccgtgtggaattgtgagcggataacaatttcacacagganacagctatgaccatgattacgccaagctatttaggtgacactatagaatactcaagcttggatatcgttgtcatctgttagggtgatgtgatcaacattcaggctgtgttcattcagactgtaatcaatcttgacggtatggggagattgtccctgtcgcagacgtctcatttcaccgtcattgttgttcctgcatatcctattttcagtctgaaggacggaaaggttgcctcttcggtattccttggctgaatggaaagactttgaacggcacaggtcacttgataaggcaattctgcggaaaaaatggctagggcatcgtcgagctcttcatggaaagtctgctgatctatatcgccaagtcgcattttcgttgagaaatcaatatctttcagtaaatcttgaactctgatatctcaggccaagcaggatcccgcctttcattatcatttttggtttcaggtattcattgaaggcaatggcctgtagaactatatgtacggcctgncggaaggtgatgcggtcctgtggcgcatcggcgatccagtcttctatagagtattccttatagagtatttatcagttgttgatggatatacaccatacttcggagtatgtctttttgtaagggtttgatgctattaattaacggcttcctccacgctgaacagtcttcttccatgttccaatcgtgcggtgggttagtccacagacttcttccagaaggtaacctaccctggcttttctataccttttcatttt

SEQ ID NO: 4939 - DNA, 650 bp, Photorhabdus luminescens
  misc_feature (635)..(635): n is a, c, g, or t
tgctggtaatcgcattgtagccattctgataactgctttgccattaatacactttgatcaaatccccgtttccatcgtcggtgtcgatgcagtggcacactgagcagaatgttgggtttataccatcttccatcacgatagccctgttgccagtgcagcagaaacagacgcgccagaactgacgcaagttgtggggtgcggtgatatttatagcgacggatcaggccactcagtggtgggcaatagtcggtaatcgctatcatattctcccatagaggcggttttttgaggcagcgcccacaaggcagtgacgggagttctgagggtagagcacagcacgggcacatgtttgccaaacgtttcagccgcttgttgcaaaagctgcatactccatgatgtggaaaccaaagaggctgatggcatagccaacagtacccaaccattgttagcatagacttcttccttgatggcaaataaagttgagaataacaatggctgatctgttttggcagacttctgatgaaggttcgcgtgatcttgtgttgctgcacggatgggggttgaatgcggaagtttggcgttccattgaaatgcgatgtgctccgcattttcgtttgcatcacgaaagaggacangacgacctaattaaa

SEQ ID NO: 4940 - DNA, 701 bp, Photorhabdus luminescens
catcgttgttcatccttcttactatatttgaatgcgttaaattataagtaaaacacagtaaaagaccatctcgcctgatattccaatggaatacaggcgaggctaacgggatctatctggacccccatacatacaggtaagaggtgaaactatgacggtgcttgcttaaaataaataatgattaaagaatacaaagacaatactgcaccaactgcatagcaggtgcagtatctctctaatttatccctacaccgccgggaaaacgggtaacagcaaatagagtttaatcacaatcgcgttaacgatatcgataaagaatgccccaaccatcggcaccaccagaaacgccacatgggatggcccgaagcgatcagtaatcgcctgcatgttcgcaatggcggtaggtgtcgcccctaaaccaaaaccacagtgacctgccgccaaaaccgcagcatcatagtttttacccatcactcgataggtgacaaaaattgcatacagcgccatcacgatggcctggatggtgagaataaccagcatgggtaatgccagcgatgccatctgccacaatttcaggctcattaacgccattgccaggaacagggaaagacttacgttgcccagtacagaaactgctcggtcaaagactcggtaaaaacctaacaccgatagactggtactgagaataacccgataaatac

SEQ ID NO: 4941 - DNA, 647 bp, Photorhabdus luminescens
atcattggttgccaaaaagatatttttcgcccggttaatcagagtatcggcgatattaataggaccctcggcgataatgcgtaatatgttatcagcagaaagcgtggttaatacccttattccctcaggggtatagtcatctccagagacaacagacagcagcccccggctggcaagcaaggtcacatcccgaccggagatatcataaccattcacatcaagatgtgattttccatccagcatgacatggttcccggcttttaaattcccctggcctaaatagattgtttctgcgtcaacggctaagttttgttctgccctcattgacgcacgatttgctaaatctcgggcagtgagagaaatgtttttcccggtgattaacgccagatccgtaggtttctttcccgctttaaaatgttctttattaaaatcaaaactaaatccctctttaaagacagccgtcaaatccccaccggcactcagtttaccaatgatattctgctgattgtcttttatcgctttggttgaaaaatttttgcctgtcagggtgagattttgtcccgcgcttaactcaccaacattatttatctcgttcgcggtaatgctgttgtttttacccgcggtaataatcgggtggctttgcttag

SEQ ID NO: 4942 - DNA, 694 bp, Photorhabdus luminescens
cgcagaagaagacaaaaatgatttcgctgaaaatagcgcttatgttcatgcaacgccggtgatccgtcgcctggcgcgtgaattcggcgttaacctggctaaagtgaaaggtacagggcgtaaaggccgtgttctgcgtgaagatgttcaggcttacgtgaaagacgcggttaaacgtgcagaatcggctcctgcatcagccggtggtggtctgccgggtatgttgccttggccgaaagtggatttcagcaaatttggtgaaattgaagaagttgagctgggtcgtattcagaaaatctctggtgctaacctgagccgtaactgggtggtgatcccacatgttacacagttcgacgaaacggatatcactgaagttgaaaacttccgtaaacagcagaatcaggaagctgagaagaaacagcttggcgtgaagattactccgctagtattcatcataaaagcggtagcaaaagcgctggaagagatgccgcgctttaacagctctatctcggaagatggtcagaaactgacgctgaaaaaatacatcaacattggtgtggcagttgatacacctaatggtctggtggttccagtgttccgtgatgttaataagaagggcatcattgaattgtcccgcgagctgactgagatgtctaagaaagcgcgtgcaggcaaactgaccgcatctgatatg

SEQ ID NO: 4943 - DNA, 648 bp, Photorhabdus luminescens
ataccgcgttatctactcagagaacgtcagaggacgtaatgaaaacggcgcaatcaaatcttggtgctcaatatttaggggatattccaggcttcctattacttggtggtggtgttcctgttaaatctagtgataatcaagtgattggtgcaatcggtattggtggcgctccgagtggttctttagatcaacagtgtgcttttgatgcaattcagaaaatttcatcagatttatcttaatcataacgatttataaaatgtacggggtaacgataatgaattaaatatctatttctacttaggaatgtagagtttaggtttaatatattccattatcataatttgcacagaggcaataactggaatgaagttattgccgctcattgattttatttatggttaataggtcatgtttagtttcagctttattttaaaatagcgactttatatacccaatggatttcaagatgcatcgcgacggcaagggagtgaatccccgagagtatagcggactatgtgaccggggtgagtgagtgcagccaacaaagaggaaacttgaaagatggcgggtatatatctaatgcaagatacatgcaggattaggaggaaaggaattacttaatgattttgtatcacaaaaaatgctttt

SEQ ID NO: 4944 - DNA, 690 bp, Photorhabdus luminescens
tgatacaccactaataccaagcccaataatgctaataacaaacccgctaaacgtacaaccgagaaacgacgttcgatcaccaacaatgtgataatcggttgaatccccatcactgtagccaaaacgccaggcgtgatcccgttatccaaagcaaaaaagtaacaaatagaatagccgccaattaacaaaacaccggtacccgcaatctgtttgcgagtaccatgttcaggtaaataatagcccttatgcctgaataataatcctagaaatatcaaaaaaataagtgcaatagcaaaacgcatcgtaagaatggcaaatgcggtactatgatcgagtccccaccgagaaaaaatcgcaccactgctccacaataaaacaaaaatcaaagtcgaactataagagatccattgagctttagaaatcatagagaatccacaccctgtcttacattttatgtacccaagtcaacgcagctagccaaatctgacaccgattaaatatcaaccctctctcagaggcaatcatattacacgattatggataaatatctgtaagcagttttcaatctccatgagcacgttgcgttaggtccaccaaataagatcaccattttgctgtaatcccataaaacaggtcaccagtaaacgccgttctggtgcagagatagtattgccattcagtaccgcatgg

SEQ ID NO: 4945 - DNA, 647 bp, Photorhabdus luminescens
tatcgtacgaggtctgggaaacaaagagagtttctgctcatgcagtcacggtgcaggacgagtattaagccgcacggcagcgaaaaaacgcttcacaatagaggatcaaaagcgtgccacggcacacgtggaatgccgcaaggacagcgacgttatcgatgaaattccgatggcctacaaagacattgaggccgtaatggccgctcagtcttcactagtagaaatcgttcacaccctgcgtcaagtggtttgcgtaaaaggataatcaagatgaaagaaaaatttggtatcagtgacatcatgaagcaacacatatgccaaaaactggcgcaacttgagacagagctgcaaatacgaatactctacgcctgtgaatcaggtagccgcggttggggatttgcctcgacaagcagtgattacgatgtacgttttatttatgtacatgcgccatcatggtacttacgcgtcgatccctctcgggatgtcattgaactaccgatcagtaacgagctggatatctgtggttgggaactgcgtaaaacgttagggctgctgaaacgagccaacccgacactgatggagtgggcagactcaccagtaatctactacgaagacgtggagttcatggcggcactacgtgccctatt

SEQ ID NO: 4946 - DNA, 686 bp, Photorhabdus luminescens
  misc_feature (623)..(623): n is a, c, g, or t
  misc_feature (653)..(653): n is a, c, g, or t
  misc_feature (656)..(656): n is a, c, g, or t
atcaaacaagagaagaatagtgccgcggcgatatcgcttggtggcgctctggttggttacagcattgccattgcaagtgcagcaagcaactctgtgggtgttattgatttcgtgatgtggagtgttgttgcgctgttggctcaaattgctggcttcttcatggttcgcatattcatgatgccaaagattgtatcccgcattgagaataatgaggtccctgctgcgattgtgttggcgtcggtgtcaatttctgttggtcttttaaatgcagcctgcatgacttactgatttagggattgtatgacgaacgggaataaaaagcgcagaatgcgcagcaccgccattaacattgagagtaaacgtaaatattggcgtggtttctcattcacatcattggcgctcagtgttggttcactcgtgggttgtggtcaatcggcggatgagttgtcaattcatgtttataaggatttggcgtcttgtcagaataatccgaagaatacgatcgctgctcaatgtgaaaccacataccaagcggcattacgtgaagcggagcgtacttcgcagaaatttcgccagaaagctatgtgtgagcttgagtacggtgagtgtgaagcaatgccggnggccgtaggttatcgaccgaagatggccgnctntatgatggcggcggtgaagccagaacagtt

SEQ ID NO: 4947 - DNA, 649 bp, Photorhabdus luminescens
  misc_feature (614)..(614): n is a, c, g, or t
tatacctttaggcgttcttaaaaacagcgcaaaaccaattctatcctccaaaatacgaatctgttgactgaccgccccaggagatacacccattgcagccgccgcagctttaacactgccccgtcgaccaacttcagtaaaagctctgagagctaacagaggcaaaatagaactcatattttattctccagtgtgcactgtatgtcctctatacccttggatttcaagatgcatcgcgacggcaagggagcaaatccccgggagcataaagaacgatgtgaccggggtgagtgagtgcagccaacaaagaggcaacttgaaaaatgacgagtatatatgacaaagatactaccatgccaattacagatatcaatatataaaactgaacttcaacacccatacgggaaaatggtaaatgtaaacagaataagacatgcaaatttagaaaaactacggttggcgtttaaataatatagctttaattcacttacttttaatgctagtttctcgataattattaataactgaaataattattcaagtcagctaaatgttaaaatagcattgaggatttattatgttcaattattcaaagcataagacgtataccaatntattcaaggagaacaaaatcagcatcggcatgttt

SEQ ID NO: 4948 - DNA, 686 bp, Photorhabdus luminescens
atcaaacaagagaagaatagtgccgcggcgatatcgcttggtggcgctctggttggttacagcattgccattgcaagtgcagcaagcaactctgtgggtgttattgatttcgtgatgtggagtgttgttgcgctgttggctcaaattgctggcttcttcatggttcgcatattcatgatgccaaagattgtatcccgcattgagaataatgaggtccctgctgcgattgtgttggcgtcggtgtcaatttctgttggtcttttaaatgcagcctgcatgacttactgatttagggattgtatgacgaacgggaataaaaagcgcagaatgcgcagcaccgccattaacattgagagtaaacgtaaatattggcgtggtttctcattcacatcattggcgctcagtgttggttcactcgtgggttgtggtcaatcggcggatgagttgtcaattcatgtttataaggatttggcgtcttgtcagaataatccgaagaatacgatcgctgctcaatgtgaaaccacataccaagcggcattacgtgaagcggagcgtacttcgcagaaatttcgccagaaagctatgtgtgagcttgagtacggtgagtgtgaagcaatgccgggggccgtaggttatcgaccgaagatggccgcctttatgatggcggcggtgaagccagaacagtt

SEQ ID NO: 4949 - DNA, 649 bp, Photorhabdus luminescens
gtttgcttaggcattaaaggaaatacagttatgttgcaaaaaaatctccaatcatatgtatgtgatgtttcagataataccactgcacacacagaaaactgtgcgcgaagttctattctagaattatcacacgatacatttagccttaaacaccaagaagcaacccaagtagaattactgccacgccgccacctctatacttatacagagaaagcccggcaaaaacgtctggattatttagcaaaacataccggacatacattgaaacatgtagcagatacccatctggatgcaacgcaattaacaaaaaccattgaagggtttatcggttcaatagaaatccctgtgggaattgctggccctatcttgataaaggggcaatatgctcaaggggtatattatgcgccacttgccaccacagaaggcgctttaattgcgtcaatatcccgtggctcctcagccattatgcaatcagggggtacaactgcgcgtgtacttggacaacgaatgatacgtgcccctcgttttgaattttgcagcgtttcgcacagcattatgttcagtgattggatcaacgaacatatcagcgaactacggtatgaaattggacgccattctaagcatgcacaattggtggaagtaaagccac

SEQ ID NO: 4950 - DNA, 694 bp, Photorhabdus luminescens
gttgggctgcgggtaaggtactggctcgtcatggttctcgtaagatcattatcggtaaagatacccgtatttctggctatatgctggaatcttctttagaagcaggtttagctgcggctggtttatctgcttcgttcactggtcctatgccaacacctgctgttgcttatctgacccgaactttccgtgctgaagctggaattgttatctctgcttctcataatccttattatgataacggtattaaatttttctctattgatggtacgaaactgccggatgatgtggaagaagcgattgaagctgaaatggaaaagccactgacttgtgtggaatccgcagagttggggcgtgcaaatcgtattgttgatgctgctggtcgttatatcgaattctgtaaaggtacatttccaagtgagcaaagtcttaatggattgaaaattgtacttgattgcgctaacggtgcgacttaccacattgctccaaatgtactcagagaactaggggctgatgttgtgacgattggctgtgaaccaaacggtatcaatattaatgaaaagtgtggtgctaccgatgttcgtttgttgcagcaacgtgttgtagaagagaaagcagatgttggtttggcatttgatggtgatggtgatcgcgttattatggttgaccatttgggacagaaagttgatggcgacct

SEQ ID NO: 4951 - DNA, 646 bp, Photorhabdus luminescens
aactgttaccggcgacagcctttgtcgaacacaccccgacaggtatgtatcgcgtgggcaagggcatttcctactctgaaacggccgcgggcggatcgagcagtcacggtcagtcccgggcacaactgattgcggcagcaggtacacagtccttgctgaccgatattccaatcgagaagaccctgacgcataccttgcagacacgcgggtacgatgtacacaacccggcgttgctctcacaagcactacgggatagcgagctcaaggggacgctggcaccaatgagtggcgattctgagcctcgtcaggtcagtgccaatatccatcagttcgccgccgatcctgtgttgttcgccaaatccaacactatcaataccgagacattaatcaggtcggggagtttcccagcagaagggaacgcccagctagtgaaaatcgaatcaggcttgtacgagctcgaatacactgatcgaagcgctaatgatgatgtagcagcaggcgctaacagcatacccgcgtattttctcgactacgacagcgccgatcaggccaatgcgtcaccagcctacgtagatattcctaagcatgcgatcgccgagagtttctatttaaccggacgctatcgggtggctcggtggtagtgacc

SEQ ID NO: 4952 - DNA, 694 bp, Photorhabdus luminescens
  misc_feature (655)..(655): n is a, c, g, or t
  misc_feature (694)..(694): n is a, c, g, or t
tttggatgtggtcatcttagaagtaggcttaggtgggcgactggatgcgacaaatattgtggatgccgatattgccgcgattaccagtattgcaattgatcatattgattggttgggtgccgatcgcgaacatattggtcgtgagaaagcagggattttccgtaaagatcgctttgccgtggtcggtgagccggatatgccatcttctattgcggaagttgcgggtgaattaggagccaagttgttccgttgtggcattgactggcgtttctctcaacagaataaaaactggcactggcaatctgatgataggctatttagcaacttacctttgccaaatgttcctctgatgaatgccgcaacggcgatgggtgttatttgttgcctgttacgacaagatgataaagtcagtcgagctattaatgagagtgcaatccatcaagggctacagaatgcgcagttgcctgggcgtttccagatagttcgtgaaaagccattgttgatcttggatgtggctcataatccccatgcggcggcttatctggtacagaaattggcccagttgccccgtcagccgggcagtagaatccttggtgtagtgggtatgctaggtgataaagatattgccggtacactgacttgcctgtcacagcanataaatgagtgggattgcgctccgttgactgaacagcgn

SEQ ID NO: 4953 - DNA, 645 bp, Photorhabdus luminescens
ttgaatttttttggtaataggtccacatctaccgataccaacctgaatatcatcaacactacgaacgggtgtgatttcagccgctgtgccagacataaaaacttcatcagccaggtacaatgattcgcgcgacaatacctgctcacgcacttccagccctaaatctttcgccagtttaataatggcatcacgagtaattcctggtaatgcagcagaggtaaatggtggggtaaataatatgccatcttttacttcaaatagattttcacccgcaccctcagagatataaccagaaacatccagtgcaataccttcctgatacccacgacgacgagcttcactaccgactaaaagcgaagacaggtagttaccaccggctttagccgcagttggcattgtgtttggtgccgcacgattccatgaagaaaccatcgcatcaattccttgatccaatgcgccttctcccaaataagctccccacggaaaggcggcaataatgacatcagttttataaccagcaggtggattaacccccatgccaacatcaccgataaagaccaatggacgtatataagcactgactaaattatttttacgaagagttgcccgacacgcctccattaattcatcgacactctggttcaa

SEQ ID NO: 4954 - DNA, 686 bp, Photorhabdus luminescens
cacactggtcgtagccgtaacgatcaggtggcaacagatcttaaactttggtgtaaagaatacatttcacatctccatcaggcaattgtggaattacaacaggtattggtgatcaccgcagagaagaatcaggatacggtgatgccgggttatacccatctgcaaagagcgcagcctattacatttgctcactggtgcttggcatatgtagaaatgttggtccgtgatgaaaatcggttacaggatactttaaaacggctgaatactagcccgcttgggtgcggtgcattggctggaaccgcttatgatattgaccgcgaacaactagcatcatggctaggttttgcttcagcgacgcgtaacagcctagatagtgtttcagatcgtgaccatgtattggaactgctatctaatgccagcattagtatgatccatctttcccgttttgcggaagatctcattttctttaatagcggtgaagcaggatttattgaactgtcagatcgagtcacttccggttcttctctgatgccacagaagaaaaacccggatgcactggagttaatccgtggtaaatgtggccgagtgcagggggcattaaccggtatgatgatgaccttgaaaggtctgccgctggcttatataaagatatgcaggaggataaagaagggttgtttgatgcgctg

SEQ ID NO: 4955 - DNA, 651 bp, Photorhabdus luminescens
  misc_feature (555)..(555): n is a, c, g, or t
atccttcgctagtcttataatgctgtctaccgtaatcccttcaagtacgcctgctgaacctggcggcgtgatcagtcggttatttttgaccatcatgatgcaagatccagggccttcagccacagtgcctctgtgatttagaaaaaacgcagtatcaaaaccatttcgcatcgcttcatgctgagctaagcggctattatggtaatttgctcctgttttaatcctcggtggcattgaatcgtcactgattcgtctccaagttgaaaacgaagccgtcatccctgtgtcataacgcgcagaccttggcataggtaatgctgtaatatgcataccagtgtcttcggtataaataagtgggtcgaagtttttccccatcgcaaaataaggagcgataaccagatgcacatgttgcttaaagttgttttttcgtactaggtcgatgcaagcttcaacaatctcttgatctgtgaaagtgacaggcatgtcaacacacttcatggaatcgcgcaggcgcttgatatgctctcgtatccgatacatatacatttgcttatncgttttattccaatagactcacacacctttcaaaacatttgcgccccaaaaagcgccctgcgttctggcatgtaaagtgcactttttcccaaggga

SEQ ID NO: 4956 - DNA, 696 bp, Photorhabdus luminescens
  misc_feature (578)..(578): n is a, c, g, or t
  misc_feature (581)..(581): n is a, c, g, or t
  misc_feature (678)..(678): n is a, c, g, or t
tacctaatggttgtactagctgattattaggatataaaaatgaatctctacggacttgttgctgatattggcggcactaatgccagattagcactttgcaatttggaaaatggggttattgagcggatcgaaacatatagtgcaaaacaacacgccggattagaatctattatcagtcactatttagcagagcaaaaaacagtagtgacttatgcatgtattgctattgcttgcccgataaacggtgattgggtagaaatgaccaatcaccaatgggcattttctattagtgagctgaaacggacacttgggctagaaaaattagatgtgatcaatgacttcacggctgtatctatggctattccaatgctgacagaagaatacaagcttcaattaggaggaggagaagcggttaaagacaaaccgatagcggtttacggggcagggactggcctcggtgtcgctcatttgatcaaggtagacaagcaatgggtaagcttaccgggtgaaggtggtcatgtagattttgccgcgaatagtgaagaacaagatgcaatattggctggtttacggcgtanatntgggcatgtttcagtagaaagaatcttgtccggtagtggattggtaaacctttatcaggccattgccattttggatcatcgtcagcccggagattanaaccagaaaccgtgcgca

SEQ ID NO: 4957 - DNA, 649 bp, Photorhabdus luminescens
ccgaagcggccgcatcgaatggcaagatacgaccggtaaataaaggaacaacactccgctctaggtttctatgcagggtatctttgcgcttaccattggacagcgctgcaaccccaaagcgaagctcagccaagctgatcgctgccaagtaaagcgtctcgacattctgttcatctatccaggcaaccacagcggggtggccgctgagccgcagtggctcggaaaccacgttcgtatctagcagtatcattcaaaactcatcggctcagcaggtgtcttatcacgctcgatctcaagatcgacgccctccgcctcgcggccgatttttgccagcaaggaacccagcttgatgcgcccctccggttgtacggcgttttccagaataaaccggatttcggcctcagcactacggccatgtgtggctgcgcgtacccgcaaggcacgatgcacttcgtccggtacatttctgacagtaatggatggcatagattcatttcctcatttagcatgcattgcaatcaatatatattattgcaatcatggctgcaagcatgtgggatagaaagagagctaattgcattcaatcaaaacccattagcaaagagttggaaagaaatcagcggctaaatcaggtaaagctggcaaagca

SEQ ID NO: 4958 - DNA, 682 bp, Photorhabdus luminescens
ccgactacagcgatccaattaacgcctgatttcgaaatgggggaatttaagcgtcaggatttggtatatgaaaaagaggagctgacgatttcaggtccgggtaaatatcctgattataacttttaccgtaagacaggtgtggcaattgacggcaaatcaaaaggtgaagccgacaatgaagcgaaacctatcgacgttaaaagcctgttgccgtaaggagcgatattcatggaatttacgttttataccgctgggctgattgccatattggcaactatcagggtaattacccataccaatccgatacatgcgcttttgtatctgatcgtttctctgctggcgctttcagcggtgtttttttcgctgggcgcttattttgccggtgcgctagagatcatcgtttacgccggggctattatggtgctgttcgttttcgtggtgatgatgcttaaccttggcaaatctgttgttgaacaggagcgtgtttggttgaaaccgcggacgtggattggtccgggaatactgtcaacaatgctgcttgttgtgctggtgtataccattatcaatgtttctcatggggatattgccgacatatcacgggtgagttgtcagtgccaaagaagtgggtatcagtttgttgggtccgtatgttttggccgttgaactgctttttgctgtgctt

SEQ ID NO: 4959 - DNA, 646 bp, Photorhabdus luminescens
accatccagtgtttcttctgcacgctgcaccagcgatttaagaatatccgaggaaacctgaatgggatcgaccaaacccgttgcggtgttaattaacggtaacccgttttcactcgcttgaaattgataaggaagatttggataacgttgctgaatgtcagccagagagcgtcccatcatacgttttactgaactgatggtattcgcaggatcatacgcagcctgttgacgggccagccaaccaatttcaggacccttttcatggtagcgaacaaccgaaggaagcaggtaacgctcttcactatccatcaatgtttccgcttgcccactgcgaacagtggcaactaatgaatgtgtcgtgcctaaatcaataccgacagctaaacgacgttgatgtggtgcagcggataaacccggctcgctaatttgtaataaagccatatacgccttccttaaaagtcgtccagtaaacgttcttctagttgctcaacctgctgttgcaatttatccaaaaaacgtaatttacgcaccgtatcggctgcttgttcccactgctgttcatccaattgctgcaccattagctgactacgggttttaatcatcccattcaggcgcgcagcgaaatcagccaatgccacttctggat

SEQ ID NO: 4960 - DNA, 693 bp, Photorhabdus luminescens
tgggatacgctagcgcggagaaaattgtattaataacggcgaagatgggatcccagaagcctcagcaagtgactgctattaaatcaacgactgagtctaatacttatctctttgcatttgctgacggaaaatatactaagatcagcaaagttcagctaaaaaatgatcctaaaaccaataaattgagttattactccacttcatggcgtaaaaatggtaatcaactcaaaaatcttgctacggaaaatatctctttagagaatggatatgatgatataagcaatgatggtgattatcgtctttccaatttaatctttgaacatcatcaacccgttactattcagcatactgttgaagaagatttgcgagaaaatcagtgggtgacttatgccagcggaaccacggctaaagcagaagatatcaagctgattgatgcaaaaatgcatgggcgttcaatccattctaatggttcggtattggatgtttcggcggtgaaatcgaatcgtcgatcaaatgcttatgtctatgccaaatatgtcgagtcatataccaaagtggttgtggtggaattgaagaatgatgataaaaccggcgagctgaaatattatgccagtgcctggtataaagcgggcgaccatacccgagatttagccaatgaagatttttcacgtgcaaatggttatagctcgatgg

SEQ ID NO: 4961 - DNA, 648 bp, Photorhabdus luminescens
  misc_feature (616)..(616): n is a, c, g, or t
  misc_feature (629)..(629): n is a, c, g, or t
taccttcgtcaaattcaccggcacgcattttttcgaacaacaccaagttttcttcaatagtgcggtcacgatatgggctatttttgcccggctcttttaacgtaccacgatattcacggatctcttctggactcaattgatcaacataagccagacctttgttgatcaattcaatagcatactgatacagcgtatcgaaataattagaagagtagcgaatatcaccgctccactcaaaacctaaccactgaacatcatttttaatagaatcgacgtattcaacatcttccttaactggattggtatcatcaaagcgcagattacactgcccctgatagtcctttgcaacaccgaagttcaaacagatagattttgcatgaccaatatgcagataaccattgggttcaggcgggaaacgagtatgtaccgatgtatgtttaccagttgccaaatcttcgtcaattatctgacgaataaagtttgtcgggcgggcgtctgcctcactcattgttttatacctcaataatgccaaaaacgcgtcacataaccgcctataatccaacaagcagtgccgagaaacaaccatttgttcgtgtaaaatggcgattcagtacanagttggagcgaanaaacactcaacagtagcac

SEQ ID NO: 4962 - DNA, 682 bp, Photorhabdus luminescens
  misc_feature (672)..(672): n is a, c, g, or t
gtcacgcatcagtttgtggaagaaacggaaatacatcagatgcatgatggcatgttcgataccaccgatgtattggtcaactggcagccaatagttagccgctgctggatcgagcaggcccttgtcataatctgggcaggtgtagcgagcgtagtaccaggaagattccataaaggtatcgaaggtatcggtctcacgtagtgcgggctggccgttgatagtggtttttgcccactcaggatcagctttaattgggctggtgatgccatccattttgacatcttctggcagaataacaggcagttgatctgctggaaccggaacaactgtgccattttccagtgttgccattggaataggagcaccccagtagcgttgacgggaaacaccccagtcgcgcagacgatagttgactttacgcttacctacgcccatttccaccagtttattagcgatggcattaaaaccggcttcgtgattcagaccgctaaattcaccggaattaaacaggatattcttatctgttaccggtgcttcatggacgttcggttcattaccttcattgtccagaataacggcttttattggcaggttatattttgtcgcaaattcccagtcgcgttgatcgtggccaggcactgccatgactgcaccggtgccgtattccatcangacgaagttt

SEQ ID NO: 4963 - DNA, 650 bp, Photorhabdus luminescens
taatgccatatctttattatcaataatttcatattcattaaattctccaatagaaccggataaaaaatacgaacttttaaaaaattcaaccggttccatatgaaaacttattgtctcacccatattgaattatcctacagttttactccagagatcaaagacgctttgtctgcctgtttaatttacgtatttcccctgaatatcagtgtatacatctctttggatttaataatattgccattatccatatttttttagctatattttgtatgtgagtcactttttcgatatggtatcagttgattgatttaaatttattttatccagagcatttcttattacatcatgattaccttgatgccttgccattgcactaaccacacggcgttggcgtggcatgggtattcacccacggtaagaaagaagccagccggaagtgattccggctttttgttgtttcagagaaaaaacagaataaaatagcaaaaatatatcttatgtatatatttatcgttaatattatatttttctgtattatccctttgtttatcttattatttattttatatttttgcgattttaagctatatatttaatatataagtccaaccctgtaagatatttattttaagcataaaaataacaaagcc

SEQ ID NO: 4964 - DNA, 680 bp, Photorhabdus luminescens
atgaccgtgctctacgtcaaggtttagaggatagccagtaatgaagcgctccggcggtaatacctcatggttcggtagtaataccgtatggtttgtattgctggcagcgctgatgttaagcggttgtagcagtgcatggcaggcaacgaagaaagtcggacaggtagtctgggacccatcaactccagttggtcaacctgcgaacttaccttccaccgtcgcgatcactttgctggcagaacctgatattaaccccaataaaaatggagaagccactccggttgaaatgcatctgctctatctcagtgaagattcccgtctacttgccgctgattatgaccaactggcgagtgacaagctggataaagcactggggaaaaattatatcgaccatcaggattacaccttattgccggggcagtacaaaccactgccagtcatcccgctggaaaaaaatagccgttacatcggcgttatcgttcgctatgccgatattaatcaatccgaatggaaaaaggtcatccgtgtgaaagacacaggacagcaataccacattctggtgcatatcagagcgaacgaagttgaacttagaaaagaggagcaataactatgccaggcaagaatcgggtgatttggcgcgaaggattattcatcaagccacaacactttcaacaacaaca

SEQ ID NO: 4965 - DNA, 641 bp, Photorhabdus luminescens
taggcggcaaccagattggtcagccagtaacatttggttcagcggctgaccctaaaagtgtgctggtttttaatgtagatgataagtcagccgtgaaaaaaattaaaaaggatgagcacggcaacgaaataggcgagtattattctcatcattctctcaacaggttttctgtgcagctttggcaaacgaaggcgatagaccccaagctttctggtgagttcaaaacgtctatggaggcaactctagtcatgaaataacgctgcgctggcaaggtatttaaatatggcatggtggcttagccgccataggtatttcatctcaataaatcgcactatttcatttctcatgtggtaacaaattgacccgttagtcaccagtggagagtaaaatgacaatcaatgttaatgattcaatgctgcttcagataagcggtagccagaccgatttgcctggaggtcagactattaccggcaaacaaagtaatcatggggattttcggttgccggcctgtttgtctcatttgaaggatacaccgttgtacatggcagtcgcgtattggggattattgaaggggagtggatttaccaaaagtgaaatcagccaggtgttccgagtgacagaacgccgggcaacagatgtga

SEQ ID NO: 4966 - DNA, 661 bp, Photorhabdus luminescens
ctccaaatcaataggttgaggcgcgttttgtgccggatcgtgccctaacagcgttgaacctttcaaacgtctacgccacacgggatcttgtatatcgggtggataggttgcaacggatgtatcagccattttcatggcatgttgcagtgtctcaggtgtaaataccgctttgcccgcagcatcagccagccagttcaacgcgtcttttaatagttcaggccgattatgtggcaaactcaagctatagagtgtgaaatcatatgaaacaatcgctggaggcagtgggtattttggatcaatagcactgttccataactgctctaatttggtagaagataagcttttgctactaaagagtacgactttcggaatcaaccaggtataacccgtttgttgggttttctccgccagtgaccccgttttcacgaccaagcgcaactgtattctgtcgttaggacgttgtggtgtctgcaaaatttgccagttaaaaccgttttccagtttaccttgtttccaggcagggtcaggctgcaaggcttctgcctgcgtctggcccgcaactgccagcattatcccaccaataaaataacgaattttcgtaccctgcatgtgaacccctatagatgtctatccttggttttagccttcgaaggtttaccat

SEQ ID NO: 4967 - DNA, 640 bp, Photorhabdus luminescens
  misc_feature (574)..(574): n is a, c, g, or t
gtggcagatatttatgagcacgtttgtccaaatggtttggtaccagttgtatagtgacagaccaaatgacatgtaaaccggattggcgtttttgtaatttattggcaatcagataatctgcaaagtgtgttgctcgccattcccaacgaatcggttggccattattgtccataacttgtccataaaggaaaggttctttactgatctgaatatcgttagtatcagaataaagatcaactgaacctggatcatcacccattaataaggtcgtgataatggccttgcgtaaataggttgtagggtcaattggagaaattgtttcaattgtgatcgttccagcttcaaaattgatatggctgcgggtccggtattgatcggtatatttaacgtaatccttcgggcctgcaattaatacttcatgcaacccccaaatgttctcaatgttatgagcaaactggcccatcaaaatatcaaaaccattggtatcttttatatattcttcgcggtattcactatttttgttgctggtacaggaaataagaattggggcaataacaaacaacgctaacagttntttcatcttacattgccatctggtgttgaatacaacatcagagccacgggctctgatgaaagctaa

SEQ ID NO: 4968 - DNA, 690 bp, Photorhabdus luminescens
  misc_feature (663)..(663): n is a, c, g, or t
cccggctcatacggagtatctcttctggcaccatactattcaaatgtggtggacgtgctgctgataagaccaaatattcaacggttcggttagcttgttctaaaagtaatgccagttcatgacataacaaagcgcccatactatgaccaataagaagaagaggcccctgtgtatgcagcaatacatcttttgccgcggtagccaccaaatctcttatacataaagggagtggttcaatacttcgagaacctcgtcccggatactgaagcaccagcactcgataactatcagtcaacagttgctgaacccagtcggtcatagaataagcactgccgccgccaaaaggcgcaatcacaacagtcattgtcgtctgctgtcgatcgcagtaattccataatcctggcgtcagttgaacacgtttcattccaacgtctctgcggaaactttcaatttaggatcactccaatatgtagctatccaatccaggcattcttgttctgatcccgaaaaacccacattttgccaccctaacggtaatatccgcccttcaggccaaatggagtgcttaccctctttgttacataccaccctgtaattcatgatgtttcgctccgccgtttgatagtcaccacttgatccgcctgagcaagcaggtcaatattntgcgaggcttacatccagatccccgac

SEQ ID NO: 4969 - DNA, 644 bp, Photorhabdus luminescens
  misc_feature (619)..(619): n is a, c, g, or t
atcaatttcagccagttcaatacggaatcctcgcagttttatttgatcatcattacgccctaaaaactccagcgttccatcaaattttaatctcgcttgatcacccgtgtgataaatataaccacaacgaccagaaaggttgtctttaacaaatttttgttgcgttaattcgcgattgcggttgtaacctcttgccaaaccggggccacctaccgcaatttcacccactacccccataggtacaggctcgccataagcatcaaggatataaatgtgggtattggcaaacggcgtaccgatgggaacataggcatcatcaggcaaacagagatgcgtgacatcaccgtaactagcatcaatcaccgattctgtttgtccataaatattgaaacaacgggcatcggtatgcatcagcttttgtaaacggttcaaatcacgaccataccaagcttcggaacccactaatatatggcgcagtgaattcaatcgaactctgttttgttcagcataatcaagtaaatttctcagaatgaccggcacaaaatcaccaaatgtcacgtgttgttgttcgataagctgatacaaatcctctgtggtaattaaatccgacttgcgacanatcaccaagcggccaccggtggtca

SEQ ID NO: 4970 - DNA, 696 bp, Photorhabdus luminescens
gcgatttggccctgttgccgccggaagagcaggattacctgttgcaccatttgaaccagacagcggtagagtatgaccgtagccgatgtattcatgagtggatagaggcgtttgctgaacaaacgccggatgctattgcgttggtctttggtgaccaaaagctgacttatgcgcaacttaatgccagagccaatcagttagcacatcaattaagagctcagggagtttcaacgagtgggcgagttgctgtgttgttgcaaagaagcatcgacatgatcaccgcactattggccgtgatgaaagcaggagctgcgtatgtaccggttgatcccagctttcctgtcgacagagtgcagtacatgctgaacgatgcagagccacaatgtattataagcaaccgcgaatatgcatcacgatcagttggttttgcggaattaacctgcttactggatcacattgaccttagccaatcacccaccacaaatattcctaaacagtcgatcggtttagctgcatctgctctggcctacgtgatttacacttcgggttctacgggcaagcccaaaggtgttatggtcagccactcggcggttaataacttcttgatctcaatgcaagataacttgcagtgtgtggcacaggacaatattttagccatcacgacgatttcctttgatattgcagtgttagagctct

SEQ ID NO: 4971 - DNA, 647 bp, Photorhabdus luminescens
  misc_feature (628)..(628): n is a, c, g, or t
atgaacatactcgatagcttcagtgattttatccattggcagttgatcaatatgagatatattaaaacgttgatggatgaaactgtatgcttctgaacacatcatcccacgtttaccaacaagcatatttacagcatcacgtaatagagtgtgttcatcagttatgattttaggagagtgataattccctactttcctaattgatggcaaaacttcatttgtgacccacttacggaaacggtgaggaatagagccttgcttaattgcatcacgacaacgaagtactaaggtatacattccggattcgctgacaacattaatatcatcctgatgccctatattaaacatagaccgctcatcatcatccaatctttcaatagcttgcgtgatattttgaatttctagagcagagcaaacatcgtgagcaacaaaccacggctcaccatctttattgataacgcggatttcatgagatccgaatttgaatatagtgaaattactttcagctttaattttagctaatgcattcatatggccacctcgctactcaagaattttgatattttcagtcaaaaaaacttgctcacaacacgctctgaatcatcatctttagcaacagctatgattntatgttcgagtaaaccttg

SEQ ID NO: 4972 - DNA, 690 bp, Photorhabdus luminescens
  misc_feature (632)..(632): n is a, c, g, or t
tagcactggcgaagatcccttttgaagtggtaccgggcatcagttcatccattggtggtctggcttgtgccgggatcccggtcacccatcgtgattatgcctcaggttttcatgttgttaccggccatctgcgtcaggaaaatgaatcacaggattgggcgacactggcaaagttggaaggtacgttggtgatcttaatgggaatgactcaactggcgagcatctgtgagcaactgatcgcaggcggtaaagcgccgacaacgccggcggcggttgtgatgtatgctagccatcagcaacagcaggttgccagcgcaaccctgctaacgttggctcagcaggtagccgctcagggattgagtgcaccagcattgattgtgattggtgatgtggtgcgtttgcgggaaacactggcttttagtcgggatcatctattgttgtcttctgttccatcactgatggcactctgattctctgtttaacatttggggataatatttgatgagcgaacatggcggtaatgtgctggaaatggcgctgaaaatcggtgttacagtcgaagagatgattgatttcagcgcaaatatcaatccgttaggaatgccggaatccttgaaaacggccattatcgnaccaattgcatgtgccgagtactatcctgatacagaatatcgccggttacttgcagcg

SEQ ID NO: 4973 - DNA, 665 bp, Photorhabdus luminescens
tatcagactcacacggcaagacggggagcagtcacattattgataaatcgggaacaaatcgtgataggatagaaatacggcaataaatatccgttgctgacactggtcaataggcactacagcgaaaagtatcatgataagttgatatgggtcacaaaagtaatctataaacaggcttgatagttggattgccgaagagtttttttactcgttttataccctatggatttcaagatgcaccgcggcggcaagggagcgaatccccgggagcatagataactatgtgaccggggtgagtgagtgcagccaacaaagaggcaacttgaaggataacgggtatataggataattaatagattattgattatttttatataaccaataccaatactcacaggtcaacggagtaacacatgtccagacggctcagaagaactaagattgttactacacttggtccggctaccgaccgcgataataatcttgaaaagattattgctgccggtgccaaccgtagtccgccttaacttttcccacggtaccgccgaagatcatctccagcgagccagcaaagtccgcgagattgcagcccgcctggggtggcatggcccttatccttgccgatctttaaggacctaaaatccgcgtatcaacgtttaaagagg

SEQ ID NO: 4974 - DNA, 707 bp, Photorhabdus luminescens
  misc_feature (650)..(650): n is a, c, g, or t
catatcgggcacgagaaagacctcaggcttgcgtccagagagatattgttgaccaatgttaaataacatatttattcattggctcaataacacgggtatcccagagcggaaattgtgcaaaggtgaattgttaacgccacgcgcaacaaaaccctgcaaccactcaggggcttgatttaacaccttacgggccgatgcttctgattcaaattcaccgaatacacatgcaccggttccggtcaggcgtgacggcgcgtattctagcagccatgaaagaagctgttcaaccttacggaaacgttttcttacaagagattcacaatcatttaggtacggagcctttaataatgcggccagagggcgaattggtgtatcacgttttaattctggatctgtgaagacacgcagagttgagatttcaataccaggatgcgcaaccagataccatttttcttccggctcggctatgtgcaggatttcaccaataccttctgcgaatgcggcatgccctttgacaaagatgggcacatcagcaccaagacttacgccgagggcggccagtgtttcgtctgtgaaaccggtttgccagtgataattcagggctatgagtaccgtagcggcattggatgaacctccgcctaacccaccgnccattggcagacgtttgttgatatgaatatcagcacctttatgagcaatacccgatg

SEQ ID NO: 4975 - DNA, 647 bp, Photorhabdus luminescens
ttatcgaaagagattaaactgagttatcaatatcagtttccggttcatgtcatgggttataactggctccagtctaatgcggattccgcaaatcaactggctgagcatcttattgatattattacacactataaacagcgtggtcagccctgtgaaaaagtgattctggtgacacactcaatggggggactagtggcgcgtcactattcagagaaattggagggaagtaagaaaatattaggtattgtacacggtgtcatgccgacctatggcgcgccgacggcttataaacggatgaaagcgggtgaaggggggggagtcggactggttatcggcagtaatggcgccaagatgacgccagtgatggcgcaatcaccgggaccacttcaactattacctagtttgagatatggcactgggtggttgcagattaaagatggtaagacactttataccttacccaaacgcgatccttatgaagaaatctacttgcaacgtgataagtggtgggggttatgtgaagatcgtctaattaatccgaccaatgagaaaagaaatccggtagtaatgcaggcagattggaaaaaatatactcatatactgtctcgtgtagtccaaccttttatcgaagagttaactggttgtta

SEQ ID NO: 4976 - DNA, 702 bp, Photorhabdus luminescens
  misc_feature (605)..(605): n is a, c, g, or t
  misc_feature (608)..(608): n is a, c, g, or t
  misc_feature (611)..(611): n is a, c, g, or t
tcgccgccttgcggccatttctcccggtcaaaattaaacgccacccgatataagccgtctttgtcgatatcgccgtaggtatcattcactttggtactgctcacccgcgcgggtatcgtgccggccatcaccggtttcggcacccgctccgggcgaaagcacacggtctcggaatagggaatggcagtgaatgtcatctcaaaactgctgtcccggcgggcactgttggtgatgtgggtgatgatcgcccctttgcgaaacgtttccggggcgtcacctttcactttcaattcctgccccggcaccagcgtagcggaagtggtcattccccgcaggcgaatgcgttgattcaggtaacgttcgtgatgcaaacgggcataaaacaccccactttccgcctccggttgataggcgtaacgatcaccgggtattcggtagtcgtcacggtaatggtacgcttcgccataagtcgttcgatcgccccgtgtcacatccgcctcggtgttcaagccgggatacggccgggcatcgtggtagtcataattccgagtcgcaatttttccctccaccacctgatacgcggtctccatgccccacaccaccgngtnctnctcgccgtgcatacctgacggattgcgggcaggcaggtagacattgaactggtagtcacgctggtcgtcgtaaactccaccacatcgatct

SEQ ID NO: 4977 - DNA, 712 bp, Photorhabdus luminescens
cctttcggctacgacccggggcatctctagagtcgacctgcaggcatgcaagcttcccaatggtgatgatgaccgggcacaaaccctgtacaggcaaatcccgcctgctgcaaaatttccattgcctgaagcgtcccttcccctaccggcagtctcacatatatcagtttgtgtgccggtaactctgccacctcttttacccgctcggttgtctgcttttctatccacacttccaaccgacgtccatgattggttatacggatatctgcatcaaccaactcctccggttgcagaggctcttgaccaaacacttgagtcaccgatgtcaaccacagttgccaaccggaaggccaatgtacctctggaaacggccagctttgtaaaggtaaacaacccagtactatgctttccgggcgtgcctgatcaaacggtgatgttacatagtccggcagcaatcccgtggtgtgaaaccccagattttgggccagacgctgactatggttatgcgacgacacttgcttaattgtgaggatacttaaccccattttcttagcctgatcacacaagtatcgtccaagcgcggtagcaataccctgcccacgtgcctgtggatgtactgcgatcaacgccagttcagcgcttaatgagcagtgttcatcccgccacagtgcggcatgccccaacacgtgttcatcctgtaccggaacagcgg

SEQ ID NO: 4978 - DNA, 845 bp, Photorhabdus luminescens
  misc_feature (1)..(1): n is a, c, g, or t
ncgtcagggctacactttatgctttcggctcgtatgtcgtgtggaattgtgagcggataacaatttcacacaggaaacagctatgaccatgattacgccaagctatttaggtgacactatagaatactcaagcttttattacccgcaatcttggggtgggtctggtcaccagtttgatcgcactggtgttgggcggattgttatctttctggggcgatcgattcgggttatctactcaggctattaaaataattgtctggattatcagcatggtgggggtgatatggctgttgaatctttttcgtgattacaaacagcgtctgcctgtacaggaagtagcggttaaaccgcctgtagagcaagctgtactttcagaagcgccattttattttcaacggttgcaatatcagcttcgtcggcgttatggccccctttggcgtcggcgggtatgtattttgttggtgatgggacaacgggaacaagtagaagccattgcccccgggttaaccgcccagcactggcaagaaggcgagcaccacctgttgctgtggggcggcggtttgcaggtacagccggataaagcgcagttacaggcgttgcgccaattgcgtcgccgtcgtccgctggatggcgtggtgtgggtgatgaccgaagagcaactcggccagcgaacgcagatagagaccgcgttgcgcatgctggagaaacagggacaacagcttggctggcaggccccggtgtatgtgtggaatgtgcgtcacagcaactgggaccagcgcgaccggccaacccagaccgtgggctgttttctgtcagaagagtgtacgcctgagagtctggcgcaa

SEQ ID NO: 4979 - DNA, 647 bp, Photorhabdus luminescens
attaataataaaggaaacctatcgaaaacccttaaggatatgggaagcagcgataccgttaaatcaactatcacatcaatggcgatgggtggcgcactggcgggttttgataacgtcatgggatgggataaagccgccaatggcgctcaaattgacccggcaaaagcgacattacctaaactgagcaatggcgactggagcaaagtggctcaacggatcgccggtcaatccattatcagttccagccttggtacagccatcaatggcggtagttttaaggacaattttaccaccgcattacttgccaatattggcagccagattaacgccgaaggtgccgggttgattggggctaacggtcaggtgttagatttacccggaaaagccattagccatgcggcggtttctgcccttgctgcggaaattggcggcggtgatgccaaaggggcggcggctggagcattagccgcagaattggccgcgataacattggataaaacattcaatgatccaatgaaaattcaggcgggtggcaaaatcatcggcagcgtcgcaggggccattgcgaccaacagcgccaaaggggctaacagtggggctaatgccggggaaattgttattctctttaaccacctgaactccatgaa

SEQ ID NO: 4980 - DNA, 716 bp, Photorhabdus luminescens
  misc_feature (582)..(582): n is a, c, g, or t
  misc_feature (652)..(652): n is a, c, g, or t
aagttatagagatcaccgataccgccctgagaagcaggagtattcacgagaatacgagctgttttcattttatcgccaaaatacttgattcgtgcggcttgattgtcctgatcggtatacaagcaagaagtgtgaccaattccgcccatttcaaccaatttttctgccttttctacggcatcttcaaagctattaccacgatacatagcgagcagtggagacaatttttcgtgagcaaagggttctgcttcatcagttaagctcacttctccaatcaagatcttggtcttttcaggaacattaatgcctgccatttcggcaatttttgttgcagattgaccaacgatttccgcatttagactaccgtttttcagaatgatatcttgaacagctttcagttccttgccttgtaacagataaccgccatgagtaaagaaacgtttacgcacctgatcataaatttcatccaccacgataacggattgttctgaagcgcagatgacgccgttgtcaaaggttttagacatcagaatagatgcaacagcgcgtttaatatcagctgattcatcaatgacaaccggngtgttaccggcaccgacgccgattgcgggcttaccagagctgtatggccgctttaccatacctgggcctncggttgccaggatgagattgatgtcttggtggtgcatcaatgcattggaaagttcacggagggt

SEQ ID NO: 4981 - DNA, 654 bp, Photorhabdus luminescens
  misc_feature (572)..(572): n is a, c, g, or t
ttctattttaatttgcgtgaaattccaccacgcagcaagaaaccgaataccttgcagattgcgctacaaacccggatcaagctgttctatcgtccgaaagccatttttgccagccgtaccgatttggataatccgtggcaagagaagatgactttgacgcgtcagggggaccgatatcaggtgaacaacccgacaccctattacatcaccgtggtggatgcagcaagccagcttaagggtaaaacggtggtggactttaagccattgatgatcgcgcccaaaagtaatgtggtgctgagtgggagtgccggggcattaggcagtgcgccggtgctgacatatgtcaatgattatggtggccggccgcaattgatttttagttgttcaggcaaccattgtcaggtggctcaacgttcgtcgtgacgggcgaagccgggaggaacgacgatgaacatcaagcggataggctacggattgacactggcgatctggctgataccagtgatagagagtcaggcggcggaaaagcgagcagccgatatcgaaggcttgcatggcgaactgcatgtgtntggtgagctgactgaggcggcttgtcgactggacatgacctctgcatggcaggaggtgaatttggggggtacaccaaacagt

SEQ ID NO: 4982 - DNA, 705 bp, Photorhabdus luminescens
atcagatcctgaccaataccacggcaaaagcttctcctttggcgcttaaattatccgatctaaaactgatcaattacgacatggataaatatggtgccaatgatgtacgcaaagagttaattaccaaatgggtgacagaagtgaaaatggcgaaataaagtcagtcaagggcggatcacctccgcccttagaagctatccgtcaggctactttatgttcccgcaccaatggatagcttcttactgctgctaccacacaataataaaatggaaggaaattatgtctcacgcattcagacaaaagcaggatgccgtgttctggtggattgccctaatgtggttggccttcgcgcttctgccatcatggagcctggactacggcctttttgaatctactcaagatgaactgctcgccgcctacggctggaacggattaaacatcagcttactgtggttcctgctgccttcagcgctgctattacgtccactcacaccagcaaaccgcaatcaaccttaccgccactattttgacgcgggttatgccttactatgcgcgctatttgtggttattagcgcgggcattatcggtcgtgggctgggctacgctacgattttcctgtttatctcactgggcgcgatgattactctagccctgtctcgccttgaatggctaggtggtgatagttttgttatcggttcatagtcg

SEQ ID NO: 4983 - DNA, 640 bp, Photorhabdus luminescens
ttacaccgcaagcaatgattggtcatagcctcggtgaactggttgcggcctgtgtagggggtatgcttgaactggaagatacactggcattggtagcaaatcgagcggcaatcatgcagcgccagcccacaggagcaatgctggcggtacaggcatcatctgaacgtatggttgcgctggcaccggagtgtgaatttgcagcactcaacgggcccgcacagtgcgtgataactggcagccatgacaatattgcggtactggaagaacaatgcaacaaggcaggtatttcttgccagcgactaacgacatcacatgcatttcatagttcattgatggatgctgccgcacaacagatgcgggaattcagcgcaggcttcacgctacaatccagtaccattccgatgatatccaatatcagtggccgttggttcagtgaacaagatcgcgataattctggttattggggagatcatctgcgtcggccagtacgcttctatgacggtattcttacgttactgaaccattatgacaatccgatcctgcttgaagtcggtccagggcgtgcactgaccagtatgctgaaagatctacagcaaacaggccaagcccagatactaaccacgatgcgccatactcgcca

SEQ ID NO: 4984 - DNA, 695 bp, Photorhabdus luminescens
  misc_feature (546)..(546): n is a, c, g, or t
  misc_feature (568)..(568): n is a, c, g, or t
tgatggatgaagaaatcgaaacttatgagcaggagagcgagattccggcaaccagcttgatgatggttggagattctcttcctgcttttggtattgtcgctgctgttatgggggttgttaatgctttggggtcggcagatcgcccggcaggagaacttggcgtgctgattgctcatgcaatggttgggacattcctcggtattttgctggcatatggttttatctcgccattggcaacattgctacgtcagcgcagcggtgaacatcttaaaatgatgcaatgcattaaagtgacattattgtccagcctgaatggttatgctccacaaattgcggttgaattcggtcgtaaaacactctacctcacagatcgcccttctttcactgaattggaagaacatgttcgccgggtaaaagcacctgttcagcaagaaactgaagaacaggtatgaaaacgcgtaacgtctcagtcattagggtaaaaagacgtaaaaggaatggcatcaaacatcatggtggttcatggaaaattgcttatgctgattntatgactgccatgatggcattntttctggttatgtggctgttggcaatttccagcccacaagaattgacccgaattgcagaatatttccgtaccccgttacaagttgcaattaataaaggggagcgtagcagtgatagctcgaatccta

SEQ ID NO: 4985 - DNA, 644 bp, Photorhabdus luminescens
ttcgtgccagtaaggagcattaatatcatcccagcggtaaccttggatcttctcccaaagaattttacgatcagaaacagaattcaaatcttgacgggcctgactcacctttttctcggtttccgccaattgcagagttaactcttttttatcgttattcagaatggctaaacgtgatttgtttgaaaaacccagacaccagcgtcttctgtcatctattcggtactgatcttttttctcaaagcgccctttatccatgtgcattaacccctgttgtgtcatcgaaaacggggtttgatccaattcttccgtgcttgaaacacattgcaggtcaaatcgttgcaaatggtgcttgagccactctcgataagggtgagtgcgccaaaccagtttccttagataaccatcagacttaaacaccaccgattggccttgagttgtagaattattcacaacttgaacacggacatgtaaacccgtatgccgagcgtttaaccaacgagtcaccattgaataacaatgatgtggcacagcaagtgttgttcgtaacccgcctaacgccctctctatcgcgccctgccagctcttttcacgatcttcgacatcgataagctcaccgataaatacacattgctctttactta

SEQ ID NO: 4986 - DNA, 699 bp, Photorhabdus luminescens
  misc_feature (534)..(534): n is a, c, g, or t
  misc_feature (607)..(607): n is a, c, g, or t
ttctggccatcaggattgagcaattgctgaataaagatgagatcctcgaactctatctcaataaaatttaccttggttaccgggcttatggtgttggagctgcggctcaagtttattttggtaagagtgtcaatgagttgacactgagtgaaatcgccatgattgctggtttgccaaaggcaccttctacgtttaacccgctttattcttatggccgagcgattaaccgccggaatgtggttctgagccgtatgctcaatgagggctatattactcagcagcaatataatcaagctagaagtgaaaaactggtagcgaattatcatgcacctcagattgctttctctgcgccctatttgtccgagatggtgcgtcaggagatgattgagcgttatggtgagaatgcttacaccgacggttataaggtttataccacgattacccgtaaacttcagttagctgccgtggatgcggttcgtaataacctcattgattatgatgtgcgtcatggctaccgtggggcgcaggaagttntgtggaaagtgggtgaacctgcttgggatcgggaacaattgtcaagaagcttaagaccttaccaagttatggngcgttaatgccggctgtagtgaccaaagcaggtactgatcaggcgatagtgatgttgcctgatggcagcagtgtagaattgcccatcgcggg

SEQ ID NO: 4987 - DNA, 649 bp, Photorhabdus luminescens
  misc_feature (610)..(610): n is a, c, g, or t
tgaataaagcgggtgcaccgacaatatcagaaatattctctgtcacggcagcatccccgcaaatgattgtttcaggcaatcccgatgtttctgctacgcctttatcaaccgcaatggacagtgttctgccttctcagagacgacaggaagataacccgatgactgaaattgtttcatcagccgtgaggccggttgatgagatttcttctgccgtcatgacagtcgcaccggagaaagggggacagtcggatgggagcacgcaacagctattgtcattaatggggatgaatgtcgcgggcacagtgacagaacagattatggcgagtgaagcggaaatcgtaccgccatacacatcaatgccttcacaacacgcggttcaggcaacatggcagaacgaaaatgcgattgagacaccctgtattggagagcaattctgggactggctgtccgctggattaaggcatggggtaatgaccattaatacgccggaagcccggatacatctggtcagtggttttgtgtttgtgagtgcgctggccattttcttccagtttctcagtgagaagaagcaggtggatggcaaggaggttagcgaaaaattgaaaacggntacaaaccgcatttgagcggttgggacgacatcgagtca

SEQ ID NO: 4988 - DNA, 686 bp, Photorhabdus luminescens
  misc_feature (513)..(513): n is a, c, g, or t
  misc_feature (626)..(626): n is a, c, g, or t
  misc_feature (686)..(686): n is a, c, g, or t
tcgcgtttccgccatagcaaaatatgccttagcatcataaaattgatagtgcagaccgataatctcgctaaatgctttacccaacctcatcaagccctgatacccaagcttactgaaaatagcatctggtggtggaggtgcgtagaaatcaccactgtcaaaattctctagacggtcaaacttaacatcatagcaacgctcagggatggaaaaaccgacctcttccgagcgcatctggaggtattcaacatcagatatttcaacagcggaaaaaatcatcacaaaatcatgatcttctacagaaaaatcaaaccggtgatactggatttctccaacagtagcctcaataaatcctgtctgatgaaaagttggcattagcttattataggtagacgaagaaatgaatattgttatcttacagcaatctatacgtattaacaaaagctcataataaacatgaagctgaatagcaaactaaaaatatcgacaggttaaaaatacaactactaactnttcgtttaataagcgttatacacagttacaccgctgatattggttcgcctccccagctcaccaaccgctttcattcacccgaccctttgtggggtcaggtgaatgagctctantcagccgtgcaatgtgcataacacacaactcgttttacaattcacaccatagacgccgcn

SEQ ID NO: 4989 - DNA, 650 bp, Photorhabdus luminescens
  misc_feature (606)..(606): n is a, c, g, or t
tgcacgactgaccatcaacgttaacaaggcgcatttcaacttgcttgcccgggcattgccccaattgttcaatgataacaatcgcggctggctggaacaggccaagatcatggggccgaaaaatctgggcagccgtaccgaccaagctgtgatctacctttccaaagccgggatcgagcatgctcaaaccatcagcgaaaagcttagcgaactgttaccggcgacagcctttgtcgaacacaccccgacaggtatgtatcgcgtgggcaagggcatttcctactctgaaacggccgcgggcggatcgagcagtcacggtcagtcccgggcacaactgattgcggcagcaggtacacagtccttgctgaccgatattccaatcgagaagaccctgacgcataccttgcagacacgcgggtacgatgtacacaacccggcgttgctctcacaagcactacgggatagcgagctcaaggggacgctggcaccaatgagtggcgattctgagcctcgtcaggtcagtgccaatatccatcagttcgccgccgatcctgtgttgttcgccaaatccaacactatcaataccgagacattaatcaggtcggngagtttcccagcagaagggaacgcccagctagtgaaaatcgaat

SEQ ID NO: 4990 - DNA, 694 bp, Photorhabdus luminescens
  misc_feature (655)..(655): n is a, c, g, or t
tttggatgtggtcatcttagaagtaggcttaggtgggcgactggatgcgacaaatattgtggatgccgatattgccgcgattaccagtattgcaattgatcatattgattggttgggtgccgatcgcgaacatattggtcgtgagaaagcagggattttccgtaaagatcgctttgccgtggtcggtgagccggatatgccatcttctattgcggaagttgcgggtgaattaggagccaagttgttccgttgtggcattgactggcgtttctctcaacagaataaaaactggcactggcaatctgatgataggctatttagcaacttacctttgccaaatgttcctctgatgaatgccgcaacggcgatgggtgttatttgttgcctgttacgacaagatgataaagtcagtcgagctattaatgagagtgcaatccatcaagggctacagaatgcgcagttgcctgggcgtttccagatagttcgtgaaaagccattgttgatcttggatgtggctcataatccccatgcggcggcttatctggtacagaaattggcccagttgccccgtcagccgggcagtagaatccttggtgtagtgggtatgctaggtgataaagatattgccggtacactgacttgcctgtcacagcanataatgagtggtattgcgctccgttgactgaacagcgtg

SEQ ID NO: 4991 - DNA, 646 bp, Photorhabdus luminescens
tccctcatcaacttcacatcgcaaatgaagtcggcaagcgctacgcaccaagagttctgttagccgatgaagtcggtttgggtaaaaccatcgaagccgggatgatcatccaccagcaattgctggccggtcgtgctgaacgtgttctggtgattgtgccggatagtcttcaacatcaatggttggtagaaatgctgcgccgtttcaatttgcgctttgccctgtttgacgatagccgctatatcgaagcacggcacgatagcgataatccatttgaaacagaacaattggtactctgttcactggattttgcccgccgtaataaacagcgttttgagcatatgcttgaagccagctgggatttgatggtggtggacgaagctcaccatctggtctggagcgaggatgcacctagccgtgaatatcaggttgtcgaacaattagctgaacagatcccaagtgtgctgctattgactgcaacaccagagcagctaggacaggaaagtcattttgcccgtctacgcctacttgacccaaaccgtttccacgattatcagacttttattgacgaacaacaaaaatatcgtccagttgccgatgctgtcacactgctgttatcaggtgaacaacttaataataatcaatt

SEQ ID NO: 4992 - DNA, 697 bp, Photorhabdus luminescens
tgccagtgtttcggtgacatatctaccgttttcttgattcaattcgccagcgattgcgggcacatgaagaggaactggcagtattgtcaatgtcccggcagcctgtggctcgggggttttgtcagcagaatattcttgtagttgcaaaggtaaattaagttgtctggctctgtcgagaagcaggttggggtctgcgcaagcgaccaattgcattggccaactttgttgagcaagagccactgttaaatcaggcccaaccccggcaggctcgccgggggtaataacaattggtttattgataataatcggtttattgttgtgcatcgttgccatctaaaattttcacataagctgaggcgcgttgttcctgcatccagctttgtgcttcttcggtgaatttacggttgaacaacatacggtaagcacgatctttctgagcgacatctgttttatcaactttgcgagtgtccagtagttggatcagatgccaaccaaaagatgagtgaactggctgactgatttcacctttgttcagtcgcattaatgcgtcacggaaagcaggatcgtagatatcaggagccgtccagccgagatcaccaccacgcagggcggagcctggatcgtctgaaaactctttggcggcatcggcaaaatcagtttttccactgcgaatgtcactggcgatttgctgcaactt

SEQ ID NO: 4993 - DNA, 652 bp, Photorhabdus luminescens
caccgctttgtttataatttatccccttgccagaatcaccaacatatcaataaaagcgttacaggcgaaatattcaccttaattattcggaaaaatagtgctaaataactgcttaattaacgttgcctaaccgaggaaacacaccataggcaacgttttgtttgtttcttatgacgaaacaccattcgtcaatggtgattccttatcaaactagtgattgctgttttacacaaaagattttcagatcggtagttcagaagccattttccagtttattgagctaacgctcttttccagacttatacgacaaacaattgcttctatctctttttgctcatccagtgttgctaacacttcaacgcacacttcaaattttccaggttgaactttatcagcgaaactcaatgattttaacctcactgctactccattgagcgcctgtaatactaacgttctcaccagaatttcgtcatcactgtcacacactacgtgaattttataacactgtacttgatcaatggcctgctgcctgggttgtaaattaatacgttgagctgcttcacgtaacaatatatttgcgcaaagaataatggcagttgctatcgcagctagccaatattggccaaggccacacagcacaccaattccagca

SEQ ID NO: 4994 - DNA, 703 bp, Photorhabdus luminescens
  misc_feature (599)..(599): n is a, c, g, or t
  misc_feature (612)..(612): n is a, c, g, or t
  misc_feature (635)..(635): n is a, c, g, or t
aataccgtgacttgattgataccctatttctcattaccactgtaataattttgggtgaaaataggatgatttttaggtattttgttgtgaaatacacagaggcaaaattttggtaaagcgaatgaacggaataaattaaaatacactggttagggtgatgaattcaaagctggagtatttattagtttatgatgtacaagatcatgttttcgagctaaatttagcagacaaccagataatcattttgataaggtaggtaagagcctatgaatgaaaatggattgagtcgatttattgtcgattatattgaaagccgtaaacagtcaaagttggaggtttttgataaagaggctgaaaaaaaattggcaaaactaacctctatggaggatattacgccagttaaacaaaagttagctgaacaacgcaaggaattggaagagcactatgaagttagaaattggctggatgatgcagttagccgagtagatcaaatccgcttagtgacacatgttctgaaatttgcccatactgatgcaagaggtagcagtattttcgcggtacaatcaaaagcaaatgtaaaagaagatattaaatatctntccatggcagctntagatagacctgctatagatgcngcaggaaatgcggctgctcttgatattgcgaaattattattgacagatatcgggaaggtgattcattg

SEQ ID NO: 4995 - DNA, 648 bp, Photorhabdus luminescens
  misc_feature (583)..(583): n is a, c, g, or t
tactgccttgagcgaatcaatgcccaaatcagcccaagtgcgcggcatcattgattcagtaaaatcttcgtcccaatgcaggaaatccgccagcaacgtgcgtaattgcccggaaaccgatttacctactttaccttctatctgatgtgcggcagatcgtggcccagacagagcacgaacctgaacaataatctcggaaataaactcagatgcctctaccccattgagcagatagtgattaaaggccagaacgaggctcatctctttgttgtgaggcgcaccaatgaacaatgttgactgagatggcggcacaataacaggtacggcaaaggtagcaccatcgttgccggtataggagatcatcataggaacatcaatatcaacaggcagtttttccgcatcgggatcaagtacaccattcaagtgttgcctgaactcaaaaaagctcatggtctgcgtgttcggtacttttaatgaactcaaatcgcctttctcatccagaaaagcaatacccaagttgatatccgtataagtgtgataacgctcctgatcaagcggtctcgaacgcaaacatcgggaattntttcaacgcctgagaaatcgcataagtgatgacctgaaatggcgttatccactcctgctgcccgg

SEQ ID NO: 4996 - DNA, 702 bp, Photorhabdus luminescens
tataaagaattgagagggagtcctccgcccaaggggatgctgcctttttcaacagattggtttatgacgtgggaacagaatattcattcatcgatgttctataatgcctatcgttttttactcaagagtggttattgtgaaggtgtagaggctgttgttaaagcgtatcgactctatcttgaacaatgtcctcctgctgaaggggatgcaccggttttggcgttgactcgtgcctggacgttggtacgttttgtggacagtggcatgttgcaaccttcacaatgtcggacttgtggtggaacttttattactcatgctcatcaacctgtgaatagctttgtttgtagcctttgccaaccgccatcacgtgcagtaaaaaaacgtaaactttcctcagagtctgccgatactaattcacaactgctggatggacttgctcagcacgcagtgtgaatttaaatgggaaaattattcctacaggttacagattttactttttcctcctgtaacctgtattgaaatcacaaccattctggattcaaactgctcaacttcccatccgctcaccagcttagctaaaggatatcgcgtgttagtacttttaggatatatcgtagtttttggtgcggtaatcggtggctacctgattgtaggtggtcatttaggcgcactttatcaacccgctgaatttttattatcaca

SEQ ID NO: 4997 - DNA, 652 bp, Photorhabdus luminescens
  misc_feature (652)..(652): n is a, c, g, or t
tatcatgaatgactcaaaactttcaggattggcaaaaacatgacactcatcagaaagcctgaatttattatcgttactaaccaacactcccatttcaactaagaaatcacataatcgactaaaccgagcataattaacaccagatttacgggaaagctcgcttatatcgacataaattccatctttaaagtgagtagataatccggtatcaacaaaagcatgaattgcagctgatcttctatttgatgcaattagttcagttagcattgagccatcctttttatctgtatacccgttatctttcaagttgcctctttgttggctgcactcactcaccccggtcacatcgttatctatgctcccggggattcgctcccttgccgtcgcgaagcatcttgaaatccatagggtatatattatgaaaaaattaagtattttatccaaaatccaagaaataacatgatgatagattggatatcgcaacaatctgtttatacccgttatccttcaagttgcctctttgttggctgcactcgctcaccccggtcacatcgttctctatgctcctggggattcgctcccttgccgtcgcgatccatcttgaaatccattgggtataaaacaaaatgtaattattaactttgttactttn

SEQ ID NO: 4998 - DNA, 840 bp, Photorhabdus luminescens
  misc_feature (5)..(5): n is a, c, g, or t
  misc_feature (778)..(778): n is a, c, g, or t
actanaggctacactttatgctcctggctggtatgacgtgtggaattgtgagcggataacaatttcacacaggaaacagctatgaccatgattacgccaagctatttaggtgacactatagaatactcaagcttatcagggggacgaggtatataactttttcgataatctactgccggataatccggaaatcagaagaagaattgttgccaggcacaatgctgaatcaacgcaaccttttgatctgctggctaaagttggccaagatagtgtaggtgctttgcaattggtaccgcaaggtacatccgctaatgatatcaagaggattgaatacaagcccttatccaaggtggaactagagaaagtgctaactggctaccaagctggtgcgccattggggatgatcgaagaagaggaagattttcgtatatccattgctggcgcacaggaaaagacagcgcttttaaatattgatggaaattggtgtttgccattaaatgccacgccgacaacacacatcattaaacttcccattggtaaaattgagagtcattcacattccattgatatgtctgaaagtgtggaaaatgaatatctgtgcatgttgattgccaggatgtttgggctgtctgttcctcactgcttaataatgaaagtgggagagataaaagcattagcggtagaacgatttgatcgcaagtactcatctgacaacagttggataatgcggctgcctcaggaagatttctgccaaaccttgagcgtgccttcggcgaanaagtatgagagtcatggtggccctgggattcccgagatcatgtcctgcctcttgggttcggt

SEQ ID NO: 4999 - DNA, 646 bp, Photorhabdus luminescens
  misc_feature (531)..(531): n is a, c, g, or t
ttacctagcaacaaggttgtgccattcacttcaccgctgataccgagtccagccagagtacggaattgttcaacttgcggcaacgtcagccctttggctttggcaagaatggctttggctaatggatggttagaaccttgttccagtgcgccagcccaccgcaatacttcttgttcactgtacccattaaaagtatggatatcagtcacttgaggcataccctctgtcagcgtaccagttttatcgaaaacaagggtatccaaggtgctggcttgttgcagcgcatccgcgtctcgcaccagtaccccgaattctgctgcccggccgacaccagagataattgacataggggttgccaacccaagggcacagggacaggcaataatcaacacagtggtaataatgaccaatgaatacataatctgtggtgctggcccaacgaaataccaaatagcgccggcaatcagggcaatggcgacaacaacaggaacaaatacggcggaaattttatctgctaactgaccgatttcnggcttactactttgtgcctgacggaccagtttaataattcgagctaatgttgtctggctgccaaccgcggcggcagtaaacagcactgtaccgtcttgcaccgtcgtaccgccat

SEQ ID NO: 5000 - DNA, 708 bp, Photorhabdus luminescens
gtatcccgtttatcgggatgcgccggctccgatgagtcgtaaacggattgaacacccgctttcactcggtgtacgcgctattgatggcttactcacttgtggcgaaggtcaacgtatggggatttttgccgcagcgggtggcggaaaaagtaccctgctatctacgctgattcgtagcgccgaagttgatgttaccgtgctggcgctcatcggtgaacgtggccgtgaagtacgggaatttatcgaatcagatctcggtgaagagggactaaaacgttccgtgctggtggtagcgacctcagatcgcccggcaatggagcgagctaaagcagggtttgtcgccacatcaatcgctgaatattttcgtgatcaaggcaaacgtgtactcctactgatggattcagtgacccgttttgcccgagcgcaacgagaaataggtttagctgccggcgagccgccaacccgacgaggttatcccccatcagtgtttgccgctttgccacggctaatggaacgtgctggtcaatccgacaaaggttcgattaccgccctctataccgtcttggtggaaggcgatgacatgacagagcctgtggcagacgagactcgttctatccttgatggtcacattattttgtcacgcaaactggcggcggctaaccactatccagctatcgatgtgttacgttccgcagcaggtgatgaata

SEQ ID NO: 5001 - DNA, 646 bp, Photorhabdus luminescens
  misc_feature (563)..(563): n is a, c, g, or t
cgtggcgttcgtcgcagccatttattaagttatcaggcagatggttctctacttcaagaattattctcccgagatggtattggcactcaaatagtgatggaaagtgcggaacaaatacgccgagctaatatcaatgatattggtggtattctcgaacttattcgcccactggaacaacagggtattctggttcgccgttcaagagaacaacttgagagagaaattgataaattcatcattatcgaacgcgataacctaactatcgcctgtgccgcgctctacccttatcctgaagagaaaattggcgaaatggcttgtttagcggtgaatcctaaataccgcagctctttaagaggtgaagtattactgaatcgcattgcggaacacgccaaacagctcggactggaaaaactgtttgttctgactacccgcagcattcattggttccaagagcgaggttttgagcccgcagaactctcaatgctaccgattcagaaacaagtgttatataactatcagcgccgttctaaaattcttatgctgaatttggaaccacagcctgnattcacataataagcgcaacaccgttaatctgtttttaattccacactgactgacatacttggcgattaaataaatggttatt

SEQ ID NO: 5002 - DNA, 709 bp, Photorhabdus luminescens
  misc_feature (608)..(608): n is a, c, g, or t
  misc_feature (610)..(610): n is a, c, g, or t
tgatatctgccgaacggtttctttatatcagctatattggtaagtctattcgtgatgatacggaatgtaatccttccgtgctggtgaatgaattactggattatgtttgccaaagtttttgtttaccgggaaatgaaaaactgaatgttgatgaaagtgctacccatgttagaaaacatctgttgtatcttcatgcccgcgttccatttgcaccggaaaattttataccgggcagttatcagcaaagctatgccggggagtggttaccggcggcaactgaacaaggtgcagcatacgctgaattttgccaatctattgaaatggcgcaaattcaagaaattacacttgataatttgagcagtttttaccgccatcccgttcggttttttttccaacgttgcttgaaagtaaatttcgttattgaagaaacggaattaccggaggaagaacctttcgttttagataatcttcaacgttatcagtttaatcagctattgttaagtgcactaattgaacagcaatcgcctgaaccacttttcaatcggctgcgtgctgctggaggattaccttttggtgcttttggtgaggtttattggttaagacagcananagagatgcagcctttggcggataaaattcgtgaacacaaatggaaactttatctgtcgatttacatcataatttaggccccgtgattctgacagggcgt

SEQ ID NO: 5003 - DNA, 646 bp, Photorhabdus luminescens
  misc_feature (603)..(603): n is a, c, g, or t
cttggtgttcacctggtgtataaggttcatagtgataagaaaactgttcacgggctttttcagacgactcatagcaaccgacgccaaaccaagcaaagaaagaagcgcctaataccgtcgtctctgcttcattaagtacttttatgggtaggtttaaaatatctgcttttatttggttccaaagataatttcggctacctccttcccactaacaccaattcttgagcatgaaatccgcttattttttctaaaagggataggttttgttttaattgataccccaacgcttctaatgcagcacgataaaaatgacgtcgttcagtattcaacgttattccacatcatcctgcctcggaggttaacaaacgacaattcattcttaagttattagcgccgggaggaacggataaagcttcatggatcattttaagataagcctccgaagggggaataccttgccagaaaaactgtctgatccactcaagcactccagaagccagattccccaagcctaatggagaagaagggcttgttccaatacagagatccgggcatagatcaaaaaaacacacatttcccaccataaaatggatataacaactntatttatccacagccaaccattaatttttataggtggtattag

SEQ ID NO: 5004 - DNA, 693 bp, Photorhabdus luminescens
gcctttcatcgattcggaagagtgggggcaacaattgccttcagggaacttgctacttggtgatggagaaaccatgcgtaaagctgcaatagcaggacttggcttagcacgattagctcgtttccatgtggatgctgatattcggagcggtttgttgctacctgtacttgagaactataatcctggcgataaggaagaaatatatgcagtttttgtcggccaaggtaggcagctcccatcacgggtacgggtatttctggactatctgacagagcgtatccacattggtgatggatggtgatagtcggaaaatatgatgccacgaaaatgtttgatggcccattatcgtggtgtcaatggaggtatttctatccaaatggggcacggtttcttgaatccatgttaaaaaagtatcattatttacatacaacaaaatccacatgaaatttaaccctattaatatgtggcgtttttatgggatataacgtcaaataattgctcaataaaaaattgtcgtgagatattatcgaatcacaactgttgatagatgttctaatagtgttttgagcgagatggtttaaatttaatatcattcgcaacatgggaattgaatttatcagatggaaaaataaacataaatatgccaacaggaaatataccctatggatttcaagatggatcgcgacggtaggg

SEQ ID NO: 5005 - DNA, 648 bp, Photorhabdus luminescens
atagttttgcagatttttgacaaagtgttggtcttttggtcagcactttggacggatagcggttaaccgtctgaccataatttgaaaaaatctgcggtgtacttctgccaattcgtcactgctgcttgaattctcacttttgataattaatagtaataaaagtgttgcaaaatatgatgaattacaagcatcaatcgacattatttctctaactttcagaatattcctatatatttttaagtgaaattcattgcactattgaacatttattaatccataaatggcaaaagcatgatgatgatttcagttagattcactcttcatgttgtaactcattggagaagtgaataaatggcaatagggtatttcctgctcgttggtgataaaacaacctgtggtggtcagattattactggtgaccacaccatgacatttaatgggcgagcaaccgctcgtgaaggggataaggttacctgtggcaaacatcccggtacttacgtgattgttggtggtgtatccgatgtgtttgacatggggcgcaagttggctggcacgttggatagtgtcagtacttgtccctgtcgggctcggtttatcaattcggagatggacagttatgagaagcaagataagactgctgaccgggtt

SEQ ID NO: 5006 - DNA, 701 bp, Photorhabdus luminescens
aacctcagcccggatatcgaatttttttaaatgctattttagcggggtgggaatattcaccatgatattaatcggtgaccacgatggacgtaacccgctcggctagcgacctatgcggctattacatcataccgcccataccgcccatgccacccataccgcctgctgcacctaaatcagctttatcatctttaggcaggtcagtgatcatacattcagtggtgatcatcagaccagcgatagatgctgcaaattgcagtgcagaacgggtcactttggttggatccaaaatacccattgcgatcatatcgccatactgttcagtcgttgcgttataaccgtagttgccttcacctgctttcacgctgtttgcgataacagatggctcttcacctgagttgtcaacgatctgacgtagaggagcttccatcgcgcgcattgcaacacggatacctacgttttgatcttcgttatcgcctttcagaccaacaatagccgctgcaacgcgaaccagtgcaacaccaccaccagctaccacgccttcttctactgctgcgcgagttgcatgcagagcatcgtcaacgcgagcgcgtttttctttcatttcaacttctgttgcagcaccaactttgataacagcaacaccaccagccagtttagctacgcgctcttgcagtttttcacggtcgtaatcagaagtg

SEQ ID NO: 5007 - DNA, 643 bp, Photorhabdus luminescens
taaacttacacaagtaaaatctggaagcaattcgcaaatttagttgtaattttggtctggttaaattgtaaggaaaccagctaaaagccagtatacctgaattagcggcttatgaagttttagatactgtgcccgtatcgttttcttttgaacatgctgcggaacttttccaaggtttggttaaccttagcccgcgcaaagtagaaatactccttcattccagtcatgcgatccaaactaatcgtttatatctttttttgaccgactattattcccacgaatgggctaagcgcattgataaaactaaaattgctttaggagcagggaagcgtcaagtcgtgttagggggaaagttggataaacagtatcagattacggttccggaaaagtatttgaataatggattatttcatggataaatattctccatattaccgacaagtagtgttgttaatgagtgtactgcctgtagtggcgacagagagctgttgtgcattgaaaggtgggacggcgattaatttgtttgtacgtgattttccccgtttggcggtaaaaatctcatattcgatatacaaacctggcatcgattcgaattagcatattatcgttgatgacaaggagatatttttgtctatctgaaacg

SEQ ID NO: 5008 - DNA, 690 bp, Photorhabdus luminescens
accctgttgccagctattttcctgtcccttaaccccttgcaactgggcacgggcaaacgtcacatccgcagacagtgcgcctaatgcccccagtgacacgcccgagccgaatacacctgactgataattgcccgcggccagccccccgccatacagagtgatattgtgtggcaaaccatagatcaggctgcccagcgcaaataccggggaacggctgccatcagtgaggttgccgccgtgatattgaccggccgtcaactcatatttaatgccaccgggacgctgcatcatcgggacagatgaagaggcgagggtcgagacacgggaactgccatcttcctctttgaccgtgaccgtcaagtcgccagaatccccggtggtgtacaggtcggtaaaacgaaatggtcccggcgctaccgtggtttgatacacggtataaccattctgggataccgtcacctgcgcattggagctcgccacaccggttatctccggggcaaaaccgcgctgactttcaggcaacatagcctcctcagaaaccaatttcatgccacgcaacgggatgctgtcaaaaatatccccaccggtatagatttcaccggccgtaaactcactgcgcagtgattgcacatcacgttgcagataggtattactcacctgccattggatctgcgtagagggggaaaacca

SEQ ID NO: 5009 - DNA, 706 bp, Photorhabdus luminescens
  misc_feature (5)..(5): n is a, c, g, or t
  misc_feature (689)..(689): n is a, c, g, or t
actgncagcaatgtacccggggcatctctagagtcaacctgcaggcatgcaagcttaaccctctaaatacccgtgatatggtatttctattgtcaaaaaatgcagtttattatgcaaacaatcagttaaataaaattaatctgtcatggcccgacaagctgatttattatgctatcggcagatcaaccgctctggcttttcatcaactaacaggtatgaatgttatctggtcatcagagggtgagaccagcgaaatcttgctaaaactaccatcgctacatcaggttgaaaataaacaagctttgctgctcagaggaaatggcgggcgtgaacttattgcccggacgctgacagaaagaggtgccacagttgactattgtgaatgttatttccgccagcccgtagactacccggcagcagaattcagtgcccactggcaaaagtatggagtacaaactttagttgtaaccagtggcgaaatactgcaactgttatataacttaatacccgaaagtgatcgaaacaggtggttattgcattgccgcctgattgtggtaagcgaacgtcttgcacatgccgcccgaaatttgggctggcaggatgttaaagttgcaaaaagtgcagataacgacgccttaattcaggcactagaataaactgacatgggatgcccactatgacggagcaanacagtcctccgagacag

SEQ ID NO: 5010 - DNA, 693 bp, Photorhabdus luminescens
  misc_feature (585)..(585): n is a, c, g, or t
  misc_feature (594)..(595): n is a, c, g, or t
  misc_feature (603)..(603): n is a, c, g, or t
atatttaagttttatgtcgtaacagcgatataaatcaaagagaattcggtggtgcggtagttcagttggttagaataccggcctgtcacgccgggggtcgcgggttcgagccccgtccgcaccgccaccttaatttaggggcgtagttcaattggtagagcaccggtctccaaaaccgggtgttgggagttcgagtctctccgcccctgccagttataagctaagtggcaactaaggtagtttatagtattggtgatccatatatgctacttggattagattattgataaggcgctggctttttggtcagcgcctttttcttaatggaactttgtaagaaaaacggatttgccgttacattaaaaatccccttatgcgagccttttctccagaaatgatctcacttggaaaatttgttcgcaaatattgtctggttcgtaaagctaatgttgccattgatttgaattcatcatttcattgatgttgttacacatttttcagttctcaatgttattcgatcttatagcaataaaacctttctttctaattatctattgtcaaagtgaattcttatagataactttntagactttnntggcattntcatactagttaaagtccttctgaactaagtgtctagaggatatgtatgaatggatcttaactaatattttgattgtgaaagtttttttc

SEQ ID NO: 5011 - DNA, 761 bp, Photorhabdus luminescens
  misc_feature (53)..(53): n is a, c, g, or t
  misc_feature (67)..(67): n is a, c, g, or t
  misc_feature (84)..(84): n is a, c, g, or t
  misc_feature (146)..(146): n is a, c, g, or t
  misc_feature (226)..(226): n is a, c, g, or t
  misc_feature (257)..(257): n is a, c, g, or t
aatgtgcgttggagctggattgatcatcagcatgcatataaaaaagatacttncgatttcttatgcnactatacttaagttggntttaatgccactcatcaccatattgataataaaatatttaggtgtatcaggcgcttccgcanacatcgctattctatattccgcagtgccttgtgccggcaatgcttatatattagctaaacaaatgggtggtgatcatgangcaatggcatctattattacatggacaacgntattatccattattactgtaactttaattctaggcaatatagaagttatagaaataggcataaaacagatcgtgatgatatagaaaacatattactcacaacaaatgtaatatcgctatctattactaaataaccacgtcacatagtaagccgcttaatataagtcaatccgttgtgaataatctgatcaatcgctaaaaacaaaaaaatataccgtacgtctgacaaacaccgcaggaagaaatataagcgtcaatgtcatatattaaatacaaatagctgtaatatgatattggttaaaaaatccctagttatttactgccctcaaccatactaacataatttatcttatcagagtatagaatatgccatcattctcattcctaactaaactatgatcggcatgagttggcgggagctatttgtacataactcatgatgtaattataaaataggattatttaatctgacgaaagatatgaatcccactatgattgtaagctt

SEQ ID NO: 5012 - DNA, 768 bp, Photorhabdus luminescens
  misc_feature (625)..(625): n is a, c, g, or t
  misc_feature (634)..(634): n is a, c, g, or t
  misc_feature (657)..(657): n is a, c, g, or t
aaagctgatgttgcttttgaatttttctacaaactcaatattcctttttattgtttccacgatattgatgttgcccccgaaggttgttccttaaaagaatatatttataatttgggtgtcatgtccgatattcttgcagataaacaagcagaaactggcgttaaattattatggggaacggcaaactgttttacacatcctcgttatgctgccggtgcgtcaacgaatccagatctcaatattttcgcttatgcatcagcacaagtatgtcaagttatgcaaatgactaaaaagctaggtggtgaaaattatgtactgtggggcggacgtgaaggctatgaaagtttgctcaatacagatttacgtcaagaaagagaacaaatcggccgttttatgcaaatggttgtggattataaatacaaaattggttttcagggaacattgctaattgaacctaaacctcaggaaccgactaaacaccaatatgattatgatgtagcgactgtttatggtttcctaaagcagtttggtttagaaaatgaaattaaggtgaatattgaagctaaccatgccacattagctggacactcatttcaacatgaagttgccaccgcgattgcattgngaatattgngctctattgatgcgaatcgcggngatgctcaattgggttgggataccgatcaatttccaaatagtgtcgaagagaattctcttgttatgtatgaaatcttaaaagctggtggctctaccacgggtggtttaaat

SEQ ID NO: 5013 - DNA, 695 bp, Photorhabdus luminescens
aatattgtatgcaatacaaagaatcagattttgactttgtgacacgtcaactggaacacgcggggattttctatttctttcgccatgaagaaaggcgtcatgtactggtattggcagatcacccttcggcgtttattaacgcaccgttagcggtattgccatatcaatcgaagatgggtgatcagcaaggctatgggctacgcgcctggcatattcatcgcacaatgattccaggtacggcggaaatgaatggttataacgttaaaagtgctgcggcaatcagtgccagcgccaaagcgaacagcggctattctaccaatcccaagctttctatctatgacgaccgacgtcaggaggaacgtaaccaactggaaacacaggcaacgctgtgcatggaacaatgggaatcacagtcctattacgcacgcgccgttaacagttatcccagtttacaagtggggcatcagtttaccctgaaagggcacaccagcgccgatggccgttatgccgtcggccaccagcgattaaaagcggagaacaacctggaggaaggtgaattactgttttcgtctcaggtgaccttattcccggcgaataacgtattccgtccgcgtccttcggttacgcggccctacatttccggcgtattgtccgcgttggtggtagggccgacgtcagaagagatcatacggatg

SEQ ID NO: 5014 - DNA, 750 bp, Photorhabdus luminescens
  misc_feature (94)..(94): n is a, c, g, or t
  misc_feature (440)..(440): n is a, c, g, or t
tgtataatgtgaaaaattcatggagaaatattgccatcgaccagccatcgaaggcgatatgatgtatcgtataaataataagataatcatcttntgccaattttattaaccggacgcgcagcatcaaatcggtattcaggttgaaaattagattttcttcttccttactaatttgttttacctgatcgtttttctcagtttcagacaacgcagataaatcatgatctgtaatcggtaaatcataatccgcggcaataaattgccgcggttcattattgatgattttaaaatgggtacgcaggacttcatggcgttcaagtaatgccttaacggctgcctcaaacgcctctatgttaatggattcccgcagcctgaaatcccccatacagttatattggcgactacctccatccagttgatcaataaaccatagtcgttgntgggcaaatgaaagcggataatgttctgctttaccaacacgctgaatattttgcacaaagtgatgcgtttgaatttgctcttctgcatcaagccgggtcacaaaatcatcaacttctgggtatgcctgttcccttcactgaccaactccggtgggatactgctgcggcgaagcttcgattgctaccaatatttcccacccaccgcgatctttccgcgcctcaaatcatttgatactccgcccgctttccctctccgcaatcttccccacgctctggtctgcacctctcccacccgcaaacccttctctct

SEQ ID NO: 5015 - DNA, 687 bp, Photorhabdus luminescens
  misc_feature (687)..(687): n is a, c, g, or t
atcaataaaacggtgttgattacccttcaaccgttagagacactgaccttttctttgaccccatcgaaataatcacagtgttattaaactgccctgaataaacgactttattcggggcagtgattatttttttaagaatccatttaaaggacaaaactaatgaaagcgttgatcgtgatcgatatgttaaacgattttgtcacaggagcactcgccaatgaggcggatgcgatgaagatcgtaccggtaattaaacggctaattgatcatgcccggcgtcaaccggattggctggtggtttatgctaatgacgctcatcgcgctgatgatcgggaaatgagtatttggggcagacatgcaatggctggaacgctaggtgctaatgtcattgaaacattggcacctattgggacagatcgtgaaattgtttcgcctaagcgattttatggggctttcgatggaaccgatctggaagaggttttgaaagtatatggtgtgacggaagtggtgttaaccggccaacatactcattggtgtgtcagacataccggctatggcgcgtttatacgcggttatcaaatcaaggttccatcagatgctgtgtgtgttttccccggtgtcgatcagcaagatgctattaattaccttaaaccatttaccgtgctgaaattacaatgagtactggan

SEQ ID NO: 5016 - DNA, 767 bp, Photorhabdus luminescens
  misc_feature (695)..(695): n is a, c, g, or t
aagcttgctgtactgactgcgcatcagcactatcaacccgtgataccggtccgaactgctccagaataccgcgtaaaacctgcatagaggcatgagcagttttatccatcaaccaatgtacaggccgagaaagaggatagttaggtagagagccactccccaataacggcaatacaccaagatgaacattactggtggaagtaaacaccgcaacggcaccaccttgataaatctcttccagcagtttctccaattgccccaaatattgcgggcgcatcgctccacgggatgatgacaaatgtatccctgttttagccattgcctgatttgccgcttcaattaacgcaggatgatgttctaatcccaaataagagcaggaaacaaattcagtaaagactttgccttcctccgtagtaatttgcttaccttgacgttcaaccacagtgaaactggtcaaaccttcgtcgatagcttgcgctaaggcaccggttgtccgtgaccgacgaattgtcatccagtcctgcttatgttttacatccattatctagactccaactgtctaagttcaaatgcgcttacaaccaacagtgattaccgaactgcccgttgtgtcagaaatatcttcatcgataatagttcgtaccgaggagaagccaacatctgaaaataatgctctgacactctctccctgactntcaccatgttcaataactaaccaaccttctgattgcagtagctgtttagcttgtttgataatcaaccgtgct

SEQ ID NO: 5017 - DNA, 681 bp, Photorhabdus luminescens
tcaaagtcagtcaaacagaacgtgattcacccttacttatctcattgtttaactttgcaagagattaatgagctggtgcgtaaagtatcgaatgcctatatcaaacggggttatgtcacttcccgtgccgacctcaaagcgcaggatttatcctccggtaccctcatgattaccgtgaatgaaggcaaaattgagtcaatcagccttgatgatgaaacaccatactcactcaaaatggcctttccgggcatgattggcaaaacactcaatctgcgagatattgaacaaggcatggagcgcctgaaccgcctgccctcccaacaggtcgccattgatattcagccaggaaaacaacccggttattctgcggttatcttaaaacgaacctcgacacgtttaccgatcagtgccagcttgggtggggataacagtggccagaaaagtaccggcaccgggcaaatcaatgccagtgtgaacctggataatccattacatctcgctgatcagtggtcattgtctgccaccataacagtgattttcgccatagccaccaaaaccgaagcctcacttctaatgtaacgatcccttatggctactggttgttcagttatcagtatgcgtggaatgactcttttcagaatattccggctgacttgcaagcctatcgctacaaggcgacag

SEQ ID NO: 5018 - DNA, 767 bp, Photorhabdus luminescens
  misc_feature (730)..(730): n is a, c, g, or t
  misc_feature (732)..(732): n is a, c, g, or t
aagctttttctattagcgataatgctaatgtaattagccaagaaaaatatgaagaaaatcagaatttgcagactgggtttccacaagatggtattaccactgatatgctaaataaggcattacgtcagtcttccacgatatcctctgtagtcgctaattttatcgctacacaatctggcaatgatgttctggatgatgggaatatagagaaactcaccagccaattaaatagagcgctggaacagaaaatgacaataaaggttcctgatgcttcattaacacagaaaggtattgttcaacttacaaatgtggttggcaatagcaatacattggcggttacacaaaaacttgctcaggaaataataaattcattacgtgaagaaattaatatacctgtgggttcccccattccgtggccgttaccctatccacctgtcaactatctcgtttgtaacggtgcatttttcaataaattgcagtacccaaagttagcagaagcttatcctgacggcagattgcccgatctaaggggagaatttatccgtggctgggatagtgggcgaaatgtggatccatctcgttcaatattgtcatggcaggaaggggcttatttggtacagaatgttgatcgggctaataattttatgattaccctctcacgcatgagtttgcaaattgcagtgggatattccacaaataaaatactttcgtaaagctgatattataagcnangcagactggatgcgattccgcattataggggatcg

SEQ ID NO: 5019 - DNA, 712 bp, Photorhabdus luminescens
  misc_feature (655)..(655): n is a, c, g, or t
tatatccaagcagacaacataaccataatttttatatgattaagacaatggtaatcgttaaatcacttttcaccatgtttgctattattcatactgtcaccattaactccatgattcattggttgaaaataacccacaataaaaaatcgctagtttacaaataagaaacatgtccggggaaatggaaaacgcttacgcattttccataaacgggtaaaatctcaatcagttaaatttattgtccggggggaaccgtatcaatgcgtccaaaccaaatcttggagttctttatatttacactataagtgacataaactaatcctggtccatcatcatacgagtccacaccggtaaaaggtgcctgaccaagcagaataatagcctctcctgccgccacttcttcggcagttaccgtatgaggttcaagagaataaatttttgaagatgggctatgattgacaataccattaacgtaaatacgtacattgataatactatccacatctattccattttttttacccacagcaatacgcgcatccagccctccccctaaaatttttacaagattgatcttacctcgctgtttaagttcgctctgatctttatgagtaaaaattctagctgccgctatgtacgcctaatctctggcggntgattcggtactgacttcgttaaataaaaatagagggaagatgatatagctacgttt

SEQ ID NO: 5020 - DNA, 762 bp, Photorhabdus luminescens
aagctttttctattagcgataatgctaatgtaattagccaagaaaaatatgaagaaaatcagaatttgcagactgggtttccacaagatggtattaccactgatatgctaaataaggcattacgtcagtcttccacgatatcctctgtagtcgctaattttatcgctacacaatctggcaatgatgttctggatgatgggaatatagagaaactcaccagccaattaaatagagcgctggaacagaaaatgacaataaaggttcctgatgcttcattaacacagaaaggtattgttcaacttacaaatgtggttggcaatagcaatacattggcggttacacaaaaacttgctcaggaaataataaattcattacgtgaagaaattaatatacctgtgggttcccccattccgtggccgttaccctatccacctgtcaactatctcgtttgtaacggtgcatttttcaataaattgcagtacccaaagttagcagaagcttatcctgacggcagattgcccgatctaaggggagaatttatccctggctgggatagtgggcgacatgtggatccatctcgttaatattgtcatggcaggaaggggcttatttgggacagactgttgatcgggctaataattttatgattaccctctcacgcaatgagtttgcaaattgcaacgggatttcacccacaaaaataccttcccaaaatctgcttattaaaacctcatgccaccgttcgccactcctcatttccgg

SEQ ID NO: 5021 - DNA, 705 bp, Photorhabdus luminescens
tatatccaagcagacaacataaccataatttttatatgattaagacaatggtaatcgttaaatcacttttcaccatgtttgctattattcatactgtcaccattaactccatgattcattggttgaaaataacccacaataaaaaatcgctagtttacaaataagaaacatgtccggggaaatggaaaacgcttacgcattttccataaacgggtaaaatctcaatcagttaaatttattgtccggggggaaccgtatcaatgcgtccaaaccaaatcttggagttctttatatttacactataagtgacataaactaatcctggtccatcatcatacgagtccacaccggtaaaaggtgcctgaccaagcagaataataggctttcctgccgccacttcttcggcagttaccgtatgaggttcaagagaataaaattttgaagatgggctatgattgacaataccattaaccgtaataccgtccatcgataatactatccacatctattccattttttttaccccaagcaataccgcgcatccaagcccttcccttaaaaatttttacaagattgatcttacctcgctgtttaagttcgctctgatctttaagagtaaaaattctagctgccgctaatgtacgcctcatatcttggcggtggattccgtactgactatcttcaataaaaatacagcgacgaagt

SEQ ID NO: 5022 - DNA, 756 bp, Photorhabdus luminescens
cagcaaatgttgcttgcgcgtcttgagccagttggcagaacggcaagttatcagcgggaatatctaacagcaaaatattagtaaagtcggccaacaggttgtcaacttccgtgtgcaatggcgctctgtcaaacaacgtcaggttaaacaacagacggggagcatgattccagcgacataataaaccggcaaatgcggttgccaatgccatcgttggcgtaacaccattttgttgagcaagttgtttaaaacgttgccaatattcaggagccaaacggaagcatctgcgctgaatgcggacgttttttattagggaaggttccttagccagagggagttgaggggcagggggaagggtatctaaccggctacgccagaatatctctgcttcttgtcgagcctgcgcaaattgcgcctgatattgcaccaaatagcgggaaaaatcgtagccagaatgaataaccggcaggttgcgtttaacaattaatgccgtcagttcagtaaagaacaggctaaaaactggcggcttccatgatcagcacatcaatatcagcgtgcaaccggcgctgattctctcaaacagacttagctgaatatctaacgtttccccttgttaacctgtaatacccgatggcttagttgttcactatattatttagcgcttcgtcctgctcttatgctgtaaagctgcgccagtcatgaaacgtcattcttcccataatcattcgccattccttgctggcgacatgtttccaa

SEQ ID NO: 5023 - DNA, 692 bp, Photorhabdus luminescens
atgctcagcagttaagagatgccggtgtgtccgtgcagattgaaactattgagggaatgatacatggtgcgatgcatatgactgcggtgacaccatccgttgaagcattttacaaaaaattctgtttttgttgaaaagcatcatctctgtttcaggccaatttgataagaattggcccgataacactctggaatcatcaggatacgggcatgggtagtcgtcccgacaaaatatatatacccgtcatctttcaagttgcctctttgttggctgcactcactcaccccggtcacatagtttgctatgctcccggggattcgctcctttgccgtcgcgatgcatcttgaaatctataaggtatagtccaggaagaattgttttcctggactgatttattcaacaaagccggagatgaggttttatttgccatactgatctcatacctgcataactatttttgggcaccttatttaaaactgaccaataaaaggctcaagaattttaaccgaatcagcttcgcttacatgagccgatgttgcctttataagtgctttattaaattcaactaatttcagacaggtattcatacgttgtgatgaatttaatctacttaagaggtttctatcttgctgattacaggcaagtcaatctttgcatttggagcaccttcacatttatcattcttaaaatct

SEQ ID NO: 5024 - DNA, 770 bp, Photorhabdus luminescens
ctgacgtcaacgacgatttcaagatcaagttcactgaatgttttgtagacttcaacggcttcttgcttggcagcatcacgaacagcctgttctgcggctctttgttcctgagctgctttactacgccatttagcactgtggatacgcttcatagaagggcggtttgtttcggcggatttagcaagccacagcgctttttcttcattatctaaagctactgctgctttttccaatgcttcctcgtgctgggcctgaagggaacgatgatcaatacgttctgatgaaccagcagcagcaaggaagctgttcgccatcgatgcccatgattcacgccacaacacagacatttttctgtcgttccagcttctttcttttttaccaaaaccttccgggccaatggtttttaatgtcaacataacgcgagcgtgggggttatcactatcaagatcatggaaagcgatatcagtcattatgcttttatcaacgaaatttttctgacaatactcaaggacaagttttttcttataatcattgtctaactcgggtcgaatagctacctctaaatatccagcctgctgcccgtccttttgacgttcaactcttttaacttcattccacaatgccccggagtcctttagatatgttgaggagcattaacgggggctaatatgaaatgcccgctcaattagtaccgcggctttattacaggtatcacctgttctctcacctggatatcgtaacggcatgatatccagcttaacacatgcgat

SEQ ID NO: 5025 - DNA, 709 bp, Photorhabdus luminescens
atcttaaccctcactaaaaataattatttcaaagatatatataccctatggatttcaagatgcatcgcgacggcaagggagcgaatccccgggagcatagatagctatgtgaccggggtgagtgagtgcagccaacaaagaagcaacttgaaagatgacgggtatagatctgatatttcatctttatcacaagggtgaacagcataaattgtgcctcaaagaaaccccacaacctcttacgaaattgtgggatctccaccatgctttctggttttcctatcccgcttcactgcttactgttttgcaaccacggattcattgtgaggtaaccagtaacgccgatgttcaaaagcatatttgggtaatcgaatacgcaacggtttctgcccggaaggccagcaagtacgccaatctatatcttgacctcgtaaccataaaaatcgagagtcatcttccgccatatgaagccattgatcttctttcgttgccgtagacgaagcaaaatcccgtaactgcttcaaaagatcctgtcgtgatgttgcaacgaacagtgcccgataggataacgctgccctgccaaactgtaatgtccagctaaccgctggtagttcaacgctttcatcattctcgataaaatcccctagcatagccactatttcttgtaacgatgcctgtctattagccgagatgggataataatacccctcca

SEQ ID NO: 5026 - DNA, 767 bp, Photorhabdus luminescens
aaaccctgtagtgggtgcggtgattgcgattgcggtcgcggcggtcacggcgggttcgggcctggcggcctgggcgggaagtggtgccgtgggggcgacaggcgctacgggagccacggcgagcgcggtttatggggcggcttatggcggaatgatcgggttgacctcgcaggcggcggtggccttagttgaaaataaaggggatctcaccaagacactggctgccttagcgaagcgcgaagccgtcaaatccctcgtgacccaaatcgccgtgggtggcgcattagggggcttagaccacacgatgggctggggaaaattagtggagggaaaaggcgttgtcgatccgctaaaagcgcagcttcccttattgagtaatcagaattggagtcaggtggcccagcgtgttgcggcacaatccatcgtgagttcaacaatagggacggcgattaacggcggcagttttacggataacctgcaaaccgcgttgttgagcaatataggtaaccagattaatgcggaaggtgccaaactgattggtgataatggggagattttaggccattcaagccagatattgagccatacggttgtggcaggcattagcgctgaaattgcggcggggatgccaaggggcggctgtgggtgcgcttgcggctgaattagcggcaataaccatgggaagcccggtattttgacccggcgtttaataatgaaactgagcgacaaatccataagctacaggaagcgcctaccggtaatgaagt

SEQ ID NO: 5027 - DNA, 698 bp, Photorhabdus luminescens
  misc_feature (687)..(687): n is a, c, g, or t
ttaacagcgacctctcggtaagttaacgtatcctcatccttacggacacaagataaatgtaatgccagttctgccagcgtattagttcggtaaatcgcgcgcataggcagctcataaccacgctgagccagctctgcgcgcaatgacataattaataaagagtgaccacccagagcaaaaaaattgtcgtggcggctaactttattcaaggctaatagcgactgccatagttgcgctaatacccgttcggcttcgccttcaggggcaacaaattcctgctgactataatcttgtttttgtggtagtggtaattgcttgaaatctaacttgccgttttgtgtcagtggtaatttctctaactgcacaacggcaacaggcaacatgttatcagccagtttgctcttcatcgccagatgaatagcattaatattgatggttccttcagcaaaatataagccattaattgtagtcgatcatcagagccaagttgtcggggatagacaactgcttcatgaatgccgcgataaatcattaattgattgctgatttcttcctgctcaacacgaaaaccgtttatttttacttggttatcattacgcccaataaactctaaattaccattggataactgacgtacaatatctccagtgcgataaagtcggtccgggccaaaaggattaaccacanaatacttcgcg

SEQ ID NO: 5028 - DNA, 751 bp, Photorhabdus luminescens
  misc_feature (474)..(474): n is a, c, g, or t
tgcattaatccagcaaccgccggtgattgctgaaattgcttaagttgaggatcttgtaattggatagctttacgcacattttcataagcatcgtgataaggtattgtgccggaaggacggaaagtggataacattgccatcactttagtatcgttgtccagattaggctgattagctttaactccttccaacaaaatttcattagacagagaaagagtggaaagctcggtatccatattttgctgattgagcgtcattgattggaggtctgggcggcgttgatccagatgataaacggagtcactggcatgtaaattacgtgcttcacgatagagttcagttaaataagccgcgggggagaacatagaggaaaccgaacccggtgccacatattggctggctcggccaccaaattcattattatagccttgcaattcagcatgagggagggtaattccgaggtgtactgcattntgcaattgtgggttagcgcgtttgagaatacttgcttcatataattgattctctttctgttcctgtcgtgcatcacgatataagcggttggtctctgaccaggagagatgatcagaaacttgctgacggaattcattaaaagaatagtgacaaatatcggtcagacaattaataccacattggctttgtaatacatcaggtatctctttcacgtatgagttcatgtttattccttcaaatcataaggacataaaacatccgtgtgatttttgtacat

SEQ ID NO: 5029 - DNA, 675 bp, Photorhabdus luminescens
ctgtatcaccacatggtgagcaaatttattatcagtaccgggccgaagataacttagattgtgaaactaatgaaattacgctccatccacaggccacagcacaacgttatttacatatagtgtattacggcaaccggacagccagcgaaacgttacccggtctgaatggtcgcgccccatcacaagcagactggttgttctacctggtatttgattacggcgaacgcagtaacaacctgaaaatgccaccagcatttacagcaacgggtaactggctttgtcgtcaggaccgtttttcccgttatgaatatggctttgcattacgtactcgccgtttatgccgtcagatactgatgtatcactgcctgcaagcgctggataataagataaaagaacacaacggaccaacgctggtttcacgcctgatactcaattatgacgaaagcgcaatcgccagcacgctggtattcgttcgtcgagtaggacatgagcaagacggtactgccgtcaccctgccaccattagaattggcgtatcaagatttttcacccgaacataacactgactggcaaccgatggatgtgctggcaaacttcaatgccattcagcgctggcagctagtcgatctaaaggcgaaggatacccggcctgcttatcaggataaaacgcttgggg

SEQ ID NO: 5030 - DNA, 756 bp, Photorhabdus luminescens
tactgtccgcgggaagctggatgttcaaaataaccgctgtattcgtcaggtacagtggttttttgtttgatcaatttgtttgatcaaatagcactgagcgcaggcccttccttcagataggggataagtagttatcggagtgtgtaaacttgacgttaaacactccgaattttttgacattaagtggatgtcccgccgtaaccgaatagcggctggcgtagccagagggcggggagataccctcttgtatgatttaaagggatttttgatgggaaaagcatctaatagaagtgcagtgtacctctttacaggaagatattacgacgataatggcggtaatcgtattactgctgttggggctggtggtgaagtttatgcttatggcggaaatgatgatgttaccgttggttcatttaaagtcgatgtataccatacagatggcgaccttacggtaaagggagtgtcaggttataccggtattcataaaacgggaaatggcgggctgtcatttacgggggctgccggtgtagctgctattgatcacacgggtgaaacgggaaatttaaattattcgggtgcggccggttataataaactggtgcgcaaaggagggtctggtgatgcatctcttataagaggcgccggaggataccatcagttatggcatgaaactaaccggggaaatttagattttgctggtgcaggggcaggcaatgacattaaccgtacctggtttaccgttatcaagattacagg

SEQ ID NO: 5031 - DNA, 760 bp, Photorhabdus luminescens
  misc_feature (754)..(754): n is a, c, g, or t
attgatcgcatccggggttcggtcaaaaagcagcttttcatcgctactcatagtagtttgattgcaactcggttgaacctcaagaaagtactaatattgagcgaagaaaacttgtcccaaccaacttctctcaaagatctcagtcagagcacagccaatttcttcatgaaggctcccgacaacaatgtgctggaacttgcgttgtgtaagaaggctatccttgtggagggagatgctgagtttatcctcatggatgccctctataaaaactgcactggaggtgcaagtactgataccgatggtatctatgtaatctctgtcgatggaacaagtttcaagcgttatcttgagctagccaagttgcttggcatcaaggttgcggctatccgtgacaatgacggggactacaaaagcaattgtgttactaactatgctgacctcatttcagattctgtgcagattttcgcagacgctgacgatgctcggtacactttcgaggtttgcatataccaagataatacgaccatttgtgaaggtcagttcgcagcaggtcgaagaaagcttaccgtacatgaatatatgtttaaaaacaagacggaagctgcattccaattgctcgaacagaagggaaccgaacttgtcgcgccaaattacattcagcaggctatcacatggataagagagtagtatttggcgttgccggatctggtcagacatcccgtcttgttccagccttgatgaggagaagcgcttnttatct

SEQ ID NO: 5032 - DNA, 739 bp, Photorhabdus luminescens
tggtcaacgcaatgttgccagatgcagtacagagaggatagtttgaagcgcaattttttgctgtcaaatcatgtgggattacaggagtagggattaatgtctaataacctggcttatcactatttgccggaagaggtccataagtggccgggattaccactttcgttaagtggtgaagaagtgatgccgttggattaccgagcgggtgacagcggttgattgatagtatgtctgcgcctggtactgcacgtattactaatgttcaaccccccctcgtctctcgccttgccctctgtccgccgcccctcctttctttaccctccctcgtcctccccccgcacatcttcccatatttctcgcctcttccgcgttttcgcctcctctaccgcgccccttcccatctcctcctcctttccgcgcctcacctcccccccacccttctattttctccgtcccatacttcatccccctacccgatctccgattaccctcccaaccttttgcccacgccattcgcgctctctcccctctctatccctcatcttcaccgtccgtcgctcgctcgtgctcgcaccgctttcctcctccctacctccccggccttataccctactaaacaccgccgctacaatctctcacactaacttgccttcccgtctcgtctccatcgcttccccgctctaccgctaattcttccccgttctcccgatcatcggcgcgcgccatcgcccccctccgt

SEQ ID NO: 5033 - DNA, 759 bp, Photorhabdus luminescens
ccggtgatccaatcaccgcccggttgacaaaagcttcgggtaacggcgcgtcaataggcggtctaaaagtgataacagaaaacggctggtttgctgctcgcccatcggggacagaagaagcctacaaaatttattgtgaaagcctgcttggccctgagcatcggcagaaaattgagcaggaagcactggatattgttaaccaggtttttgccgccggttgatctttttggccgattaaaaagaatccgcaacagtggtaacggcttttgcggattttttatttttcagcccagagcaaccattaatgcaccggcagtaatcagtgcaacaccacctgcggccatcagtgatattttttcaccaaataagataacggcgaagatgacggcaaacacgacactgagtttatcaattggggcaacctgagaaacatgaccgtttttaattgctagaaagtaaaacagccatgacaatgcccccgccacaccgcttaaaacgataaaaagcaatgccttgcggtttgccactatttcactcaccagatttaactttccctgtacgacaaacaacgccgacagaaacaacgccataatgactgcgcgtattgctgttgctgtattggcatcaagattttgcaacccgattttcccgaagatagcgactaaagcggcagtaaacgctgataataaggcatagataagccaggtactcatcgcgaataaatcctatatacccgtcatctttcagttgcctctttgt

SEQ ID NO: 5034 - DNA, 687 bp, Photorhabdus luminescens
  misc_feature (661)..(661): n is a, c, g, or t
tgaagcccgccgttggtgggcttcgtttatttccgtcttaggaaaacgtgattaaaccgggtttggaatatcgataaaagtgacatccagaccataatgaccagccaaccactcccccaacgccttaataccataacgttcggtggcatgatgacccgccgcataaaaatgcagccccatttcgcgggcgatatgaaccgtctgctctgacacttcaccggtaataaaagcatcaacaccaaattccgccgcctgttgaataaaactctgaccaccgccggtacaccaagcaagcttgcgaatctctgcgggtgcattgtcaccgacatacaacgctttgcgacccagcgcctgttcgatacgtgcagctaactccaccggtgttattggctgttcaaattccccatgcggcacgaatggctcaaccaacccgaccactttcgcattaatcagacgggccaattgcacgttatttcccaatgatggatgggcatcaaggggcagatgataaccatataaattgatatcattacagagcagcgttttcaggcgattacgtttcataccacgaatcactgccggctcatttttccagaaatagccatgatggacgataacagcatcagcctgaaggcgaaccgcttcattcataaagcctgancagcgtcacacccagtacattcgctg

SEQ ID NO: 5035 - DNA, 759 bp, Photorhabdus luminescens
tgatagacgtctatagtggaaaaattcccgggaataaaatgttctttaattctgatatacttaaatattatacaacagaaggagcacccgcatttttcaattcacaaacctttgccaatgaatttgttccacaaagtatagatgatttgaaatcagtactatttgaacatattttaaatgattggcgagatgttatttcccataaaataaccgttcctactttaattttttcaggtgaaaacagcgactggatagaaagccaacaatggatttcatctactgtaccaaaaggggaaattataatttatggtcgggaagagcatggagatcacttcttagcgcttaaagatccattaagattttcaaaggatctttctgctttcttttattaaaaaacaggagaaaagaatgtttaccggactaagtgcttttcctttaacaccgctgtatggcaacaaggtagatgagaagacatttatctcgcttattgaaaatcttgttgaagctggagtggattctatcggcgcactgggatcgacgggtagctacgcctatcttacattatcggagcgcgcgcatgtcgcccgactggctgttgaacatgcgaacagtataccggtgatggtcagcattggagcgctgcgtgtagcggatatactcagccttgctgaagatgctcaacacgcgggtgttagcgccgtaatgctggcacctgtttcttaccagcgtcccacaccggacgaggtgtattcgctctat

SEQ ID NO: 5036 - DNA, 686 bp, Photorhabdus luminescens
  misc_feature (583)..(583): n is a, c, g, or t
agtgaggatcaagaaaaagattatatccggattgcgacccgctctcgcttcggggtgatgcgtgtcgacgataaccgcacagaagagcaaaagcagtatgatgaagcatggcgaaaactttatcagcccagttcccaacactataaaaatccgatcccactggccccgctgctgcccggttcgcctcctgatgatgaagctttacccgctcctcccgcagagggtatgccggggactattccgcagccgttgacaaaaaaactcccgctggtcagtacttctccctggtcttttttacccagctatgaagactgggttatcctcgggcaggaggtggctggcctaacagaacaagggttggattatatccgcgacagtacccgcgaactccttgctcaatttggagcatggttaaatcaagctgggaagtgggtgtgtgaagagattattgacccgataagccatcaggccagctatgcgttttcctgggtcagtgcacaaacgggaaaaatcgtgacctggacggagagtgagataaaagcccggtggcagactgtgcaacagggttcggacatcaccctgnaagagctaaaaaacattagctggatgcagatattaaaagaggtgggtgaaggaatgctggaaatggtagtgattattgccggtgttgccattgttatccttgt

SEQ ID NO: 5037 - DNA, 768 bp, Photorhabdus luminescens
  misc_feature (547)..(547): n is a, c, g, or t
catggatcattttaagataagcctccgaagggggaataccttgccagaaaaactgtctgatccactcaagcactccagaagccagattccccaagcctaatggagaagaagggcttgttccaatacagagatccgggcatagatcaaaaaaacacacatttcccaccataaaatggatataacaactttatttatccacagccaaccattaatttttataggtggtattagtctgctaagtaacttaagtacttttttcatccgaagacagtttactgggctgtcacattttgctccctgtttgttaagaaaatttatacaacaaacagatacaaatattgagtttccacaaaaggaatatttttatgctgaaaattattcaatccccatccaaatatattcaaggacctgatgccctgctccatattggtcaatataccaaaaccatcgccgatcacgttttggttatcatcggtaattccgcgatgaaattggtgggagatacggttcatagcagcctggaacaatacgaaattactcgtcattntgaagtgtttggcggtgaatgtagtcggaatgagattaaacgcctgtctgacattcttaaaaaacatgaatgccaagccgttattggtatcggtggcggcaaagtacaagatacggcaaaagcggtcgcttacgaatccagattacctgttctgattgcccccactatcgcttccactaatgccccaaccagtgctctctctgttatttacagcgatgatg

SEQ ID NO: 5038 - DNA, 692 bp, Photorhabdus luminescens
  misc_feature (511)..(511): n is a, c, g, or t
  misc_feature (692)..(692): n is a, c, g, or t
atctgatgaagataagaagctggcaatcactactctgacgaatacgttgtatcaagcgcagcaaactcagcaaggcgtggctgtcagtctgttggcgcaaactctgaacgtgagtcagtcactgcctgcgttgttgttgcgctggagtgggcaaacaacctatcagtggctgagtgcgacttgggcattgaaggatactgttaaaatcgcggctgatattcccgctggctatctgagcctattgcgtgaagtggtacgccgctccttgttgacccaacaattcacgctaagtcctgcaatggtacaaactttgctggactatccagcctattttggcgcttccgcagaagtagtgaccgatatcagtttgtggatgctctataccttaagccgttacagcgatctactgctccaagtggggtaagccggtggtggtacggaagatgatgtgttggcctacctgcgcgtggctaatgctgctacgccgttgagtcaggcggatgctgcacanacgttggcaacgctactgggttgggagacaaacgagttgcaagccgcttgggaagtattgggcgggattgccaaaaccactccgcaactggatacgctgctgcgtctgcacaggcacagagccagactggccttggcgttacacagcaacagcaaggctatgtcctgagccgtgatagtgn

SEQ ID NO: 5039 - DNA, 754 bp, Photorhabdus luminescens
  misc_feature (661)..(661): n is a, c, g, or t
tcgcgtttccgccatagcaaaatatgccttagcatcataaaattgatagtgcagaccgataatctcgctaaatgctttacccaacctcatcaagccctgatacccaagcttactgaaaatagcatctggtggtggaggtgcgtagaaatcaccactgtcaaaattctctagacggtcaaacttaacatcatagcaacgctcagggatggaaaaaccgacctcttccgagcgcatctggaggtattcaacatcagatatttcaacagcggaaaaaatcatcacaaaatcatgatcttctacagaaaaatcaaaccggtgatactggatttctccaacagtagcctcaataaatcctgtctgatgaaaagttggcattagcttattataggtagacgaagaaatgaatattgttatcttacagcaatctatacgtattaacaaaagctcataataaacatgaagctgaatagcaaactaaaaatatcgacaggttaaaaatacaactactaacttttcgtttaataagcgttatacacagttacaccgctgatattggttcgccttcccagctcaccaaccgctttcattcacccgaccctttgtggggtcaggtgaatgagctctatcagccgtgcaaatgtgcataacacacaactcgttntacaattcacaccatagacgccgctcagacttttagctaacctaaccagaaaataatcatattatttatctgaacattgtttcaacaagagac

SEQ ID NO: 5040 - DNA, 679 bp, Photorhabdus luminescens
tgaataaagcgggtgcaccgacaatatcagaaatattctctgtcacggcagcatccccgcaaatgattgtttcaggcaatcccgatgtttctgctacgcctttatcaaccgcaatggacagtgttctgccttctcagagacgacaggaagataacccgatgactgaaattgtttcatcagccgtgaggccggttgatgagatttcttctgccgtcatgacagtcgcaccggagaaagggggacagtcggatgggagcacgcaacagctattgtcattaatggggatgaatgtcgcgggcacagtgacagaacagattatggcgagtgaagcggaaatcgtaccgccatacacatcaatgccttcacaacacgcggttcaggcaacatggcagaacgaaaatgcgattgagacaccctgtattggagagcaattctgggactggctgtccgctggattaaggcatggggtaatgaccattaatacgccggaagcccggatacatctggtcagtggttttgtgtttgtgagtgcgctggccattttcttccagtttctcagggagaagaaacaggtggatggcaaggaagttatcgaaaaatggaaaccggtacaaacccgatttgagccggtgggacaaacatcgacaaaggggggaaagtctttgtgtggtgcatcttt

SEQ ID NO: 5041 - DNA, 764 bp, Photorhabdus luminescens
taatcatggataatcttccacgcgagcacatcacgaacgaattttggttgctagcagccacctttgcgttacgagctatcatcagtgctattcgggaacgaatcggttttatttgtggcaaaatcgtgcgtcagaaaattcgcgctatggtattggataagctggaacaacttggcccaatgtgggttaaaggcaaaccagccggtagctgggcaaccattattcttgagcagatagaagatatgcaggattattactctcgctatctgccacagatgtctcttgccgtcataatcccgattcttattctgatcaccctattccctgttaactgggctgccgggctaattttattcgctactgctcctctgatcccgctatttatggcactggttggtttaggtgccgcagacgctaatcggcggaattttgtcgcactagggcggttaagcggtaattttcttgataggctacgtgggttagaaacgttgcgcctgttttatcgcggcaaagcagaaacacaacaaatcagcgaatcccccgaaaacttccgttacaggacgatggaagtgctgagattagcgttcctttcttttgccgggctggagtcctttgctgccatttctattgccgttgccgctggctatttccggttctcctatttgggggagcttaattttggcagttacgggatgggcgttactctgtttgccgggtttcttggtgtaaccctcgccccaagtttttccagccttactcgatct

SEQ ID NO: 5042 - DNA, 695 bp, Photorhabdus luminescens
  misc_feature (572)..(572): n is a, c, g, or t
aggattgtctgcaataaccccgaaatcaataacgtcgcaatccagtttctccagcatcagtcgaacggtaagacggttggtatcataaatttgcccttccttaagtgggtgaccgatagcttgtagctcatcaccggtcgagaaaatggcgacttttaatttgcgaaccacctcaacgtcggtgatgcctaaagatgcaattaggggtaactgagcggtggataatttgctgcctgccgacaaaactactgcacctttagcaatatcttcgccagccagacggatattctgaccttgcttggctggctgagtgaaaacgatgccatcatcagtagtttctgcgtgctcctgcataatgaccgtatcagcgcctatgggaatcggtgcgccagtcataatgcggattcaagttgcaactggccattctcccttgaaaggtacgccagccagtgcttttcctgccagaagccgtggtttattgcttgttaaatccccatggcgtacggcataaccatccattgctgagttaaccaaagggggcacattgataggacaaataatatttgttgcantaatgcgtcctgatgttcccgggaagctgacggtttctgtgtcagtccatggtgtaccttgcgtcagaagtttttccaacccctgctcgaaagaaatcaattccaaggtatacaggcgaccta

SEQ ID NO: 5043 - DNA, 764 bp, Photorhabdus luminescens
caggggtagagctatccatagactggctgtactgcatcgataataaatcttcaataaccagcccaatattttgacggcgatattgaatcaacaaagccgattcaatggcgttaatatcggctttcttattgactgatttgtcgttataggcttttaccgtgtcttttaaccacaacatataagctttacctccccctgaaccctgtacacgttcttccattaagtaacgggcagataaagcaaaacacaatccttgcatgaactttttagactcagcggtatcccctttagtcaggagcacactgccaatttccgggatgattttgctgattttttccaacacattaccatcctggctaaaatggaatgaataagcctccagcgctttcccattcgcgataaggtcgaagatcttattatcaattttttgtagcacatcccctttgattgccccacgatgttgagaagatgttgtcagcagatttttatccaacagtgctagcttattgaccggcaactgattaatcctgttttttgcctctttcagtacggccagatcttcttccatcaatcctgcactgaatcgtccatctgcctgtacaacaaactcggggttaacataactgctagtttcaactatagccgtggactggtaagcctctccagacaaaccactgccaagggcacccactcgctgcggtttaccattgtctctctgtttcgcttactttgcattagtctgtgcctgaaccactctatcctca

SEQ ID NO: 5044 - DNA, 698 bp, Photorhabdus luminescens
  misc_feature (698)..(698): n is a, c, g, or t
tgcggatgttacaaaaacaggcccaccagttgcgctggcaggccccggtctacctgtggcaggtgtgtcacagtacctggtctcaggaaggtcgtatcactcagaccgtcggctgcttttttcctgaacgctgtaccccggatatcgtggcgacacagttacaaacgttggttgacccgttgcgcgagcgcgggatgcagcaactgttggagaagacggcccacgattttctttgtcgtctgtccgcgaacttgaaacaacaggggattgcgcactggcaacaggtcctgacgccgtggttagcggagtatggtgatgtggtgtcgctgcggggtttgatgttcagtttgccgcttaaagcgcagacgactcgccttccgcagatctggctgcccgacacggcatggcagggggtgttggagggcagtcgttgtttccacggtcggcgggtgggcatgctccacacacagaccagtttgtcgtggcctgatagtgctgggcttgttatggggggccggaatgatgctctcctttttcaccaaccgtgaccagctagctgtggtgcaggcggcggtcactgacctgaaagctcagccggagaattctgatgcccagttgatggccttaaaggcgctgcgtaacgaggtggaccggctgcaagaccgggctgaacacggtgtaccgtggtatgagcgctn

SEQ ID NO: 5045 - DNA, 764 bp, Photorhabdus luminescens
  misc_feature (467)..(467): n is a, c, g, or t
  misc_feature (524)..(524): n is a, c, g, or t
  misc_feature (629)..(629): n is a, c, g, or t
tagcataattattcgctggactgatcttttcccatttaataacttgaccattagagtttgtatagacaatcgaaccagaaataaatttcatagttgctgtggcctgactggccgtaattttggaatcctcaaatgaaatgagtggcacacctaaaacgacatcctggagttttattccatacttctcattttcaaaacttataggaggatattgcacccccgcagctctcttttctatatattgctgaagcaataattgattaactttatttcgatcataagcaacaacggcatcccaacccaacgcaacactgcacattcttaaagagttaattatatcatttgcgttactcattacatcctccatctatttaaataacaaatatagttaatagtggccagtcaatttaaatagagactacccatgccactaattatcaataaattaacaatcccagatacagaanatctaagtcattactccatacaacattattttatgaataaatcattcatagaaaatnaatagcccacctgaaaaacacccaacaatataaatattaggcgataaaaataaaccctctttagtttaattccccggatgatttactcaacacttccgacaaatncaattaacgattaaatattaacattaacactaccttaatatactataaaaatagaaaacccattccaataacctaactattaactactatatcactatcattaaatctttaccataatctaatagtctacatctt

SEQ ID NO: 5046 - DNA, 688 bp, Photorhabdus luminescens
  misc_feature (454)..(454): n is a, c, g, or t
  misc_feature (688)..(688): n is a, c, g, or t
gctggataccgccgccctcactgcgttacgtcacttctgccatcgcgattctttagaggcaaagttgcggcacgaattgggagaacagcccttttctctgcgtcgctttgactatacacagccccgttttgaaacttggcaaccattgggattggtggtgcatattacgccggccaacgcgcctttactgccatttatggcggtgttagagagcttgctagtgggtaatgtcaactggttacgtcctagtagcagtgatcacggccttaatgcgcagatactggctgaattcctacgtcatgacctgagcggcacgttggcaccttatatctctgtgttgcctttgccggctgatccattatcagaattactggcgtgggctgatgccgtatccgcctggggcaagtatagcgccctgaccgctatccgtagccaattgcggcccggttgccgntggatagatcggggacatcgtatcagttttgcttattttgacccgatggctgccagtgatgctgattacgatgcattggctgatgatgtttgccgtttgaccaacaagcgtgttccagtccacaatgtttgttggtcgatagcgctgaccagaacgttttacgggaagtcgttagtgctgtggccgccgcattggcacgacgcgcgacaattggcctgccttaagacagaatan

SEQ ID NO: 5047 - DNA, 761 bp, Photorhabdus luminescens
  misc_feature (493)..(493): n is a, c, g, or t
  misc_feature (585)..(585): n is a, c, g, or t
  misc_feature (600)..(600): n is a, c, g, or t
cgtttcgggcacggcttcatgaatgttagaatcggggtatcgcgcagacgggtcacttccatcaatttacgtgtccgctcctcaacccctttagcggcatcaatgaccatcaaacaacagtcaaccgccgtcaatgtacgataagtatcttcggagaaatcttcatgccccggcgtatccaacaggttaaccaggcaatcttgataaggaaactgcatcacagaagtggtaatggaaataccacgctgtttctccatttccatccagtcagatttcgcgtgctggtttgaaccacggcctttcaccgtaccggctttctgaatcgcctgcccaaacagcaatactttttcagtaatcgtcgttttccctgcatcagggtgagaaatgatagcaaaagttcgccgtttagcgacttcctgctgaaaaggggaatttgacatcaataacaatcttctgctttatatacgggcttgtattcaacatcagacgcttncccgcaaggagaacagttgccaaacccgtgggtgaatgaaaaattggcgctcattttcgctgaaattggtgctataaacaatcaatcaattntatagcgcttattanggcaacagcggcaacgccatgatgatggcatcttctttacctgtcgcagtaggatagtaatgcttacgaacagagacttggttaaaccctgcttgttcatacaatctaatagcagaatgattcgattgtctgacttcaagccataaggtattcaccccttt

SEQ ID NO: 5048 - DNA, 682 bp, Photorhabdus luminescens
  misc_feature (653)..(653): n is a, c, g, or t
  misc_feature (682)..(682): n is a, c, g, or t
atcaaacaagagaagaatagtgccgcggcgatatcgcttggtggcgctctggttggttacagcattgccattgcaagtgcagcaagcaactctgtgggtgttattgatttcgtgatgtggagtgttgttgcgctgttggctcaaattgctggcttcttcatggttcgcatattcatgatgccaaagattgtatcccgcattgagaataatgaggtccctgctgcgattgtgttggcgtcggtgtcaatttctgttggtcttttaaatgcagcctgcatgacttactgatttagggattgtatgacgaacgggaataaaaagcgcagaatgcgcagcaccgccattaacattgagagtaaacgtaaatattggcgtggtttctcattcacatcattggcgctcagtgttggttcactcgtgggttgtggtcaatcggcggatgagttgtcaattcatgtttataaggatttggcgtcttgtcagaataatccgaagaatacgatcgctgctcaatgtgaaaccacataccaagcggcattacgtgaagcggagcgtacttcgcagaaatttcgccagaaagctatgtgtgagcttgagtacggtgagtgtgaagcaatgccgggggccgtaggttatcgaccgaagatggccgnctttatgatggcggcggtgaaaccagaan

SEQ ID NO: 5049 - DNA, 763 bp, Photorhabdus luminescens
gcttaagcatttaacttcgatatattttaacattttaaacatccagagttcacggctctgggtgttttaattggttgagaaaataaatttaaaaattataaattaatatcttaactggaatatagttcaattattttaagataaattcccatcgaaataatttagccctgtcatttattttcacattaattatcacaagcctaatcttcaatcaaaaaacatgattgaatattttttcattattgctaaagtatttataggaaaaaattattaagcaaaattaaatttaattgccattcatttaaaaggactcatatatggatatgaagaaaatgctaaatagcgcagattattctgatacaaaaaacgctaataaagagctggttaatggttcatttaacgaaggatatcgtggctggagaatcccaacccctgaaactgtagaaatcctgtccgagaatggcgttaattttcttagcatccaaacctattccagctctggtgtcattgatcaaataataacagggttggaacctaacgttaaatatcgactgacgggtacagcacgcttatcgactcaactaacaccacaaagggccttgcccgcttattttggcttacagaatcgcacatttggccctgaatcctttgttgtcatagcttaattttacgaccggttcagttgaattaaacacagatgatgaaggacttttacgtattcacatggctgaagacaatttgtagaacttccagaagaggcaac

SEQ ID NO: 5050 - DNA, 685 bp, Photorhabdus luminescens
  misc_feature (682)..(682): n is a, c, g, or t
agattgcaaaacatgaggattcattggtggtaagccccagttttgacctagtgggcccagtgcatctggtggtgctcccactgatgctttggtgcagtaaacaacccggttgcaccaggtttccgagcctccttccgctacgccgacggccaaatcacggtaaattccaatgggcatgccacttgtttggctttgggtaaagcagtctgcaagctgagtatcggccagccattgtagccagaggaaaaattccacttcctgcgggtgagattggcaaaatgtttgtaccgcttcaccgtgcggatcgcggtacttttccggccataccggccagccccaataggtactattttcagcatataaccggcaatgcagagcgtcatagacagcttgatagtagagacattcaccaccttggatgacaaattggtggaaagcggtttttgacggatcatgttctggacgagtgctgaattgttgatatgccagacgtagtgctgccattttcaacgccataactgtggtgtaatctacccattccgcgttacgggcatccctgtacatgcgttgagtcgtcgctgtttgccaccatctctgtgctttttcattgtgtttgaaatcttcaacctgattaatatcaatgtaaatcacattaagccagttgcgtgaagaggggctatangga

SEQ ID NO: 5051 - DNA, 762 bp, Photorhabdus luminescens
  misc_feature (754)..(754): n is a, c, g, or t
ctgctaactttgggtactgtaatttattaaaagctgagccgttgcaagtgagataaccaacaggtggatagggcaacggccagggaataggagaaccaacaggaatttcaccgactgttttaatccggttatctatctcttcgcgggtataagtatgctcacgtaatgagtttatttcttgctgaacaagcttttgcgtcactgccaatgtatcactattgccaatcacatttgtaagctgaacaacacctttttgtgttaatgaagcattgggcatatctgttgtaattttttgtgctatcgctttatttaattgagcggtgagtttagctacatttccatcatccagaatatcattgccagattgtgtcgcgataaaatcagcgacgacagatgatatggttgatgactgacgtaataccttatttaacaagtgagtggtaacattacccgatggaaatccagtctgcaaactttggttttcttcatatttttcttgactaaccacatttgcattatcactaatagaaaaagctttaaaatcattcttatgactcatgtactttctccttaaattaaataatattattttataatcaatatattgaattattttaaaaataactctcctgcaattcactccaattaaagtctagttcagaaaaataatatagttcaatattttggaatcgaaaatataccttaaaatttacatttaacatctggaaattatttttctcttattctttctatntcatcccg

SEQ ID NO: 5052 - DNA, 689 bp, Photorhabdus luminescens
  misc_feature (620)..(620): n is a, c, g, or t
taattcagctcgctggttttcttggtatcccaatgaataaaacgattgcatttggtgacggtatgaatgatgtggaaatgctttcaaccgtagctaaaggggtcatcatgggaacggcgcataatagggtaaaacaagctcttcctgatgccgatattattggttcttgttgtgaagagtctgtggctcattatttatctgaaaatatgtgctaggcaaacttggggcgttaggattcaaatcttggcgccctttgccaatagctgagctggctctatctcttgttctctgttcgctgaaacatatatcccgtgtattagttgttttttaaaattatttctattgtttttatttacaagttaatagttatgaatattcaatagggtaatagcgaacaaataaatgccatgctaattttactctatgaatttaaatagaaaagtatgaactcatcgacaatgattgatattttagatgagctgaatggcatctatttcaggatacatatgccattattttcatgatcactttgttgatatttctcacttctactctattcttttttataggtatgaaattctgaaccctcatcaagaatgcggcgatagctattgtcaatntattccctatcaatatgaggttccattatgtctaacgataaaacaggaaaatcactagaacaggaaaac

SEQ ID NO: 5053 - DNA, 747 bp, Photorhabdus luminescens
tatcatgcagatgaatttcagtttcttcttcccgctgccattaattttactggttcttggctccattattctgctggttatttggaataaactggaagaaaggcgctggctggtcgttgcctcagttgtcatgctcctgataatggtgtggatggcaggtgaacaatacttctcccttaatacagcgtatggtttctccctattagctggcactgtcttgttgttactgtcacatagtgtctggttgattaaccattaccgtttccagttcaaatcttctaaggcgattgttgcaacctgttattttatcggccattttttgattattcgttctatttatctttaataaaaagactaagttgaaaatggatatcagcactcaatcgtacaatttaacaactttattttttctttttattgactctggagtaggctccaaagtgtagagtttaatcattatctttgagttaactctattcagggggagtccatgtactcaaattcaaacaaaaatagtgctcatcaacataaccaccagcatggaagctgctgcgcgacgacgacttgttcagatcaggctaaacaagttagtgaacatttacatcatcatgaacatgaacatggtaaggcttgctcacataagcatcacccttcccatgatacacaagagacacaagcacctgagcttttggcaaaccaacgtttcagttgggtggttaatggtatggattgtccaagttgtgcccg

SEQ ID NO: 5054 - DNA, 670 bp, Photorhabdus luminescens
  misc_feature (670)..(670): n is a, c, g, or t
attaatcgacttgagatgcgacttggtgtacggctgctgaatagaacgacacgtaaacttcagttaacggctgaaggttctgttttctatgaacgtagtgtcagaattttggaggacatcatagccgcagaacaagaagcaaatcagggaaccgcgctacgtggacggatacgtgtgaattgtcatgttgcgtttggaaaacattgcttgatgcctttactaccggatttcctgcaacgttatccagagatcacactcgacatctcattatgtgacttgatagtggatttacttgatgatcgtagtgatgtggcgattcgtaccggtcctctggacgattcatgtttcatggtacgcaagttgggggcaagtcgaatggttgtggtaggatctccttcataccttgaaaggatggggataccctctatgcctagcgatctagggcgctacaatcgacttggttttggttttacccgtcatatgaaagcttggcctttcatcgattcggaagagtgggggcaacaattgccttcaaggaacttgctacttggtgatggagaaaccatgcgtaaagctgcaatagcaggacttggcttagcacgattagctcgtttccatgtggatgctgatattcggagccggttggtgctacctgtacttgagactatan

SEQ ID NO: 5055 - DNA, 757 bp, Photorhabdus luminescens
  misc_feature (704)..(704): n is a, c, g, or t
  misc_feature (757)..(757): n is a, c, g, or t
tctacagcggacgcatgctacactaccacaaagaaatttatcggcagcacggcgtaaaattaatctcaggaaagcatttcagctttgtggctccgttacgggacaacatgtcgccatacttgatgatgtgattaccaccggtgcgaccatgaccgagatttcccgtttgttaattcgtgctggcgcccgttcagtgcaggtttgggcgatctgtcgaaccttgtagtcaatacgaaaatgggcgtattataaccaactatagcagtcaactattgagcaaatgatatgattaatattactgaagcagcgcaaactcattttgccaaattactggcaaaccaagaaccaggtacacaaattcgcgtatttgtcatcaatccaggtacacctactgctgagtgtggcgtatcttactgcccgcctgatgccgttgaagcaacagatactgaactgaaatttgatcaactgtcagcttacgtcgatgaactgagtgcccccttccttgaagaagctgaaattgattttgtcactgatcagttaggctctcagctaacattaaaagcccctaacgccaaaatgcgtaaagtttctgacgattccccacttgccgaacgtgtggaatacgttttgcagtcacaaattaatccacagttagccggtcacggtggccgcgtcagtctgatggaaatcactgatgatggttntgctatccttcaattcggcggcggttgtaatggctgttcaatggttgatgtcn

SEQ ID NO: 5056 - DNA, 684 bp, Photorhabdus luminescens
cctttactgattttggtcagacagtttgccctatttggtcgatcaaatcgggcacatgttgaggccaataaggacaaagccccgtgaaaaaccttgtgtattgcctcaataaaggtttggcattttttaccgtcagcctttccgtttttttggtgttttgtgtcacatggcaggtggtttcccgctatgtgtttggtacgccaagtacggtaacggatgaactcgctcgttatctgtttatgtgggtcgccatgattggcgcggcatataccacaggtcaacatcgtcatttagctatcgacctgttaacgatgaaacttaagggaataggcaaaaatagtgtgggtttggtgatccaggccgcgatcatgctgtttgcttcgatcgtgctggtgtatggcggatcggtactggtgatctcaacccttgaaaccgggcagatcacgcccgcgctgggattaccgatgggatatgtctatttatgtctgccaattagcggtgttctgatgatctgctatgtgctagtagacattgttgctcttattcggatttttcaggtaaagacgcggttatttctgaaaatcaataaagtcactaggcagaagaggatgggcttatggattggcaagtggttttagcgttgttcggtagttttgccgtgttgctggcacttggtgtaccggt

SEQ ID NO: 5057 - DNA, 765 bp, Photorhabdus luminescens
  misc_feature (717)..(717): n is a, c, g, or t
ccggtaggggataacctgaattttttgtttttcatacattaagtctctatatatttagttatattattgtgtgtacagcattgggtactgcttaaaaccatcaaaaggtgtaagaaaaacggactagcacctgaatgggttcatcagatgcttggcgattggaaagtagctttcctcgactggtttctatatcgaataccatgcgttggtatctcagtgtggtgccagaactgattcctgcgctgctttgccagccttgtgggctgcgatatccttgaacccgaccggtatcaataccgatacgcattgataatgtgctgttggcgagggggaacgtccgggacagtgtattttgcagataccagccgttatccccggatagcgtatttttgctaaatccccggactgcattccgatcagtgatatttaaccattcgacaccgggcagaccgtgccggttgtattgcccataaaacaggttattgagctgataaggcgagttgaacagcataaaacgctgatgtagattgaccatcaacttgcctttggtgaactgcttatcgagataagcggttccggtttgtgctccaaaccaaggcaaaccctgttcaacactcagattgagcgtgattaatccggttggaatgatatgtaaatgattaacaccgagttcaaagacactcaatgtttggctactgacgccaatcttggcattgncgatgtaattattggtattcttgtaagttaattgcccgctgacactat

SEQ ID NO: 5058 - DNA, 692 bp, Photorhabdus luminescens
  misc_feature (385)..(385): n is a, c, g, or t
  misc_feature (633)..(633): n is a, c, g, or t
tcgttgatagaatgattgttgagcttgataaaacactcagcactcaagttgatgaaattatgcatgccaaagagttccaagagctggaatcatcatggcgttcactgaaattgctggttgatcgtaccgattttcgtgaaaacatcaaaatcaacatcatccatgcgaccaaagaagagttactggaagatttcgaattttcaccagaaatcatccaatcaggcttatacaaacatgtctactcaacaggttatggccagtttggcggcgaaccggttgcggcggtcatcggtaactatgcgtttagcaatagctcacccgatatcaaactgatgcaatatgtcagcgcggttggcgcaatggctcacgcgccattcctctcttncgttgcacctgatttctttggtatcagtagctttaccgaattaccagcgattaaagatctgaaatctgtcttcgaaggcccggcacacaccaaatggcgtgcgctgcgcgaatcggaagattcacgttatctcggtctgacaacaccgcgcttcttgttacgtctaccttactcaaccgtcgaaaacccaattaaaaactttaactatcaggaagatgtcagcaaagatcacgaacatttcctgtggngtaataccgcttatctgctggcacttgtttgactgacagcttcgcaaatatcgctggtg

SEQ ID NO: 5059 - DNA, 785 bp, Photorhabdus luminescens
  misc_feature (768)..(768): n is a, c, g, or t
aagctttgaataaagcgggtgcaccgacaatatcagaaatattctctgtcacggcagcatccccgcaaatgattgtttcaggcaatcccgatgtttctgctacgcctttatcaaccgcaatggacagtgttctgccttctcagagacgacaggaagataacccgatgactgaaattgtttcatcagccgtgaggccggttgatgagatttcttctgccgtcatgacagtcgcaccggagaaagggggacagtcggatgggagcacgcaacagctattgtcattaatggggatgaatgtcgcgggcacagtgacagaacagattatggcgagtgaagcggaaatcgtaccgccatacacatcaatgccttcacaacacgcggttcaggcaacatggcagaacgaaaatgcgattgagacaccctgtattggagagcaattctgggactggctgtccgctggattaaggcatggggtaatgaccattaatacgccggaagcccggatacatctggtcagtggttttgtgtttgtgagtgcgctggccattttcttccagtttctcagtgagaagaagcaggtggatggcaaggaggttagcgaaaaatggaaacgggtacaaaccgcatttgagcggttgggacgacatcgagtcagtggtggaaagtatttttgttgttgtcatctttatgattcggctgatcggactggctcctatcaacgtattcatggctacttaatcaaaaacacgttgctttatcgtgaccgtnctgtaccagaggatagc

SEQ ID NO: 5060 - DNA, 713 bp, Photorhabdus luminescens
  misc_feature (713)..(713): n is a, c, g, or t
actgaaaatagcatctggtggtggaggtgcgtagaaatcaccactgtcaaaattctctagacggtcaaacttaacatcatagcaacgctcagggatggaaaaaccgacctcttccgagcgcatctggaggtattcaacatcagatatttcaacagcggaaaaaatcatcacaaaatcatgatcttctacagaaaaatcaaaccggtgatactggatttctccaacagtagcctcaataaatcctgtctgatgaaaagttggcattagcttattataggtagacgaagaaatgaatattgttatcttacagcaatctatacgtattaacaaaagctcataataaacatgaagctgaatagcaaactaaaaatatcgacaggttaaaaatacaactactaacttttcgtttaataagcgttatacacagttacaccgctgatattggttcgcctccccagctcaccaaccgctttcattcacccgaccctttgtggggtcaggtgaatgagctctatcagccgtgcaaatgtgcataacacacaactcgttttacaattcacaccatagacgccgctcagacttttagctaacctaaccagaaaataatcatattatttatctgaacattgtttcaacaagagactacccaatgactaaccataatgacatacaacgtacaatgcgcgctcagattcggggaggcaaagctgccn

SEQ ID NO: 5061 - DNA, 779 bp, Photorhabdus luminescens
  misc_feature (677)..(677): n is a, c, g, or t
tgaggtagtcatcgatcggtatcatatgttcccctgtcgggcaactgatgtaggcgaagtactcgcagcgatcaaacgtaaaatggccagcggtaaaagtttgatagcccgtttcggtattatctattgtacattttaaattcgtattcattttttcagccctcagttatgctgggaaaaaccatcaaattcaattaattcaggcagatatcagcccatttctggactgagacatcaccgagaattgactgaatcatcagagttgcaggcttatcagcatggaagcgataagccactttttcaggcaggagggcctggtgcccacgtttgaggtagatacatcccattttttgcccatcgggagtgccattcagcttaacagcgccatctttatcttcatcaatgaccgattcatcagtcagcttgacaaaatgcacctcaacatcataatccatagcaaccacaaattcgtcgtgcgcacaggcaaaccagggcgatgtcccttcggcacgagcgatctcgatggtatagtctaaattgatcgcagcaacgatacggtcgtagggtgcactggttgccgcgatttcatacatgttggaaaaaacgtaacgtttgggatcttcaaccagcgcttggatcccacctttgtgataattatcgattgatgccaatgctgntttatattgcactaacatgatgttttatctccttaacgaaaggatggattgagaccttgaaatggatttttttttatatcatcaagtcactccgtgtgccca

SEQ ID NO: 5062 - DNA, 686 bp, Photorhabdus luminescens
ctagcttgtgggcacaatgatgccatttagcaaaaccttttaactcatctacttcttcttcgccctgtggatgtgcgcgttttgtcaaatcattcagaaaatccaacacttccttaggggtttttgccatcttggttgcaagggattgttcagcataatttttgaaaccaagcaattgagcctgttcgtgacgcagcgcaaggatttcggcgattacttcgctgttatcccatttacctgcatttgggccttgatcggatgcgcgggtattgtaggcgtggtaaatttcccgacgcagttcacggttatctgcataagtgataactggctggtagcttggtgcttctaaagtcagtagccagcctttttgacctttagcttctgcttgagctttagcggcggcaatcgcgctttcaagcagaccagacagatctttcacattaataattaatttggtccagcccatagtggcatcgagcacattattgttgaattgcgaacttaaatctgacaaacgtgcgctaatctcgccataacgtttctgctttttttcggcaaaccaataccgggtagtttaaaatcacgcacggcattttcgacaatttgcgttgaagcaaaagagcttctcaaactcacacttttacttatgacttaacgcttgatttatccctttgctgacctaccag

SEQ ID NO: 5063 - DNA, 787 bp, Photorhabdus luminescens
  misc_feature (723)..(723): n is a, c, g, or t
  misc_feature (733)..(733): n is a, c, g, or t
ctcgcgaggcttagcggtgcgggctacaacgtctgtcagggccataattgggggtcaactcctaatcgaagtgaattgaccctcatcttgacccccaaatcatctggatgtcaatggacgaaaaaagaccaacgtggataaaacagataaatcagagaatgggtagataagtaaaaattacttatttaacaatgaaatatggacataaatggaagattatggacataaaaaaagccacccgaaggtgactgatttttccacaatggtgccgaaggccggactcgaaccggcacacccgaaggcggttgattttgaatcaactgcgtctaccgatttcgccacttcggcactgaagtagtatgcggaaaacgagggctattatacctgtcagcgatctgttagcaactgttatccttctcactttggtttaagtgttgaaaaaaagatcaaacccatctttcaacacaaatgtgcgttcaattactgaacatcaaaaccctaaataagtacacctagcaatatcttttctacctgaaatagctcctcctctgcaataccagagaaaaaacaactctccccacaacaatttttacagtcatagttagtcaaaccacctgacgctgatagacaacctataatcaccttatataatctcagcatgataattcgctatgagggtaatggttatgacgattattagctggattggtgctgggatctttntgggcattgncattggcgccttgatgatgctggttaaaaagaataaatagcccgcttttgctat

SEQ ID NO: 5064 - DNA, 709 bp, Photorhabdus luminescens
  misc_feature (626)..(626): n is a, c, g, or t
tggtgcgtttccttgaagctgaggattttgatgctgcgattatttttgtgcgtaccaaaaatgcaacgttggaagtagcagaagcactggagcgtaatggctacaacagtgcggcgctaaacggtgatatgaaccaggcactgcgtgagcagacattggaacgtctgaaagatggccgtttggatattttgattgcaactgatgttgcagcgcgtggcttggatgttgagcgcatcagtctggttgttaactatgacattccaatggatgcggaatcttatgttcaccgtattggccgtactggccgtgcaggtcgtgcaggtcgtgcattgttgtttgtagaaaaccgtgaacgtcgcttgttacgtaacgttgaacgtacaatgaagctgactatcccggaagttgaactgccaaatgctgaattattgagtcagcgtcgtctggaaagatttgccgctaatgtacagcagcaattggaaagtagcgatctagatcagtaccgtactctgttgtctaaactgcaacctgcggaagatctggatatagaaacgctggcggctgcattattgaaaatggcacagggtgagcgcccgttgattctgcctccggaccacgttcgtcgnccttgccgtgaattcaacgaacgtgatgatcgccgtcgaatggttttatgatcgtgcgaacttgcgatcgtctcgcgcgacgc

SEQ ID NO: 5065 - DNA, 769 bp, Photorhabdus luminescens
  misc_feature (402)..(402): n is a, c, g, or t
atgatcgccgggaaagtgtcattagatacgaggataacccggaagctgtacttgctctctaccgggatccggaaacggtgaagctgttttacagggaacaccacaagtattcctgccactcccaaaattggggagcatcgaagggagtagaccactatcatgatgtatgtgtagtccttaatcccgctaatgtaagagcttggaaaaagggaagttttcgggatatcaatgcggagacacgcaataaactatatgtggcctgctcaagggcaagaggcaatctgacgtttattccggaatctttgctcaaagcttacaagcaatcttgatttgctctggtatcaactcggataattataagacaggtcagtgataaacgtttcttgccggagataaaacctncggcacgttgtagatgaatgactcaaggggcctagtgttcacgttggagaagccactaatccagttctgattctagccaaccgaccgattactttcctagctggcgctgcctaaggaatgtatatgcataacgcagtgacttcgggttgatccaatcgtaaatggtcgaccgagcgatacctaatttgttgacaactgtcaggcatacgcaggatttctcctgccggcgatgacatagttggagctcctttatttggcttgctctggaccatcacttgatgggagcggattagtctagagacccatccaccgttttgcacagactgtggaatcattcctaccgacagctcaccgattactgccccta

SEQ ID NO: 5066 - DNA, 703 bp, Photorhabdus luminescens
  misc_feature (507)..(507): n is a, c, g, or t
tggtcaacgcaatgttgccagatgcagtacagagaggatagtttgaagcgcaattttttgctgtcaaatcatgtgggattacaggagtagggattaatgtctaataacctggcttatcactatttgccggaagaggtccataagtggccgggattaccactttcgttaagtggtgaagaagtgatgccgttggattaccgagcgggtgacagtggttggttgatatatggccgtggcctggataaacaacgtattagtaattttcaacatcggcttggcgctgctattgtcatcgtttcttcatggcgtattgatgattatcaggtagtacgtattgccggaaatttgactgctcgtattaaacggctagctgatgagtgtcggttagatgtggttcccttggggcagatcccacggttgcggtcaccaggtttgctggtgatggatatggattcaacagcacttcaatttaatgtattgatgaaattgcccgtttggctggcgtangtgacaaagtggcccaaattactgatcgggcaatgcaaggagagttggatttttctgatagtctgcaagagcgagttgctcagttggcaggggctgatgctgatattctgcgacagggtgtagaaaatttacactgatgccggggctgaccataatcgtgcgtaagtgaaatcctttgattggcttgggacatcgt

SEQ ID NO: 5067 - DNA, 769 bp, Photorhabdus luminescens
  misc_feature (489)..(489): n is a, c, g, or t
  misc_feature (559)..(559): n is a, c, g, or t
  misc_feature (662)..(662): n is a, c, g, or t
  misc_feature (727)..(727): n is a, c, g, or t
aagctttaggacaatctgaacgctcaacaacatcagaccaagggagtgatgcattaatgccatacttttccacagtcagaacatcactatcgggataaatatcgctgaatgtattattcacaaacttattattagcgatactattacaatcagagccctgtatcagcaccaatagattcttaccacctctttgcttaagatagtaagttatttcactaccatcatgacggaaaaactgtttatgtgcatttgtatttgagtaagcaaaacctatataacatgaaaaaagcagagcaaatgtcaaaattctctgtcgtaaattaaaataatatgctttcattaatctctcctttaattgacatatacaaagaccacaaattgacgatattgttcctgtcagaaaaaattttaaaatttaaaaacaaggttcagagttttttatccaaagtgctaactaaaacacccatacctttggagagaagaaatgcnaaccactttatccacagaaattacattacccgataattatcatacccacgattttttcgctcttcatcanagggataaacacaatatcgctgaaattgtggaacagaataaagttcaaaaagggatgatgtgggatgacaaacctgcggaattaaccatagcgattaatgcanaaaccgcacatatacaatctaagattgatggtgacacaacaggcctgatgagcgcttatctactntagcatcacatatgccagggcttctaccagcctgtcatctat

SEQ ID NO: 5068 - DNA, 689 bp, Photorhabdus luminescens
  misc_feature (491)..(491): n is a, c, g, or t
  misc_feature (689)..(689): n is a, c, g, or t
tgatgcgtgatattgcctggggatttttttatggcactgttgcgtttgatgatgtactgggcacgactaatcattacggtaacgtcgatttgtacatggggtcattccataaagaatggacccgtgctggccgtgattataaagagaatttcaaatctgacgagctgatggcgattttcaaagccatgatttctgactggaccaacaccgggtttgatcccttcgctgcaccgcaggaaacgggagtggcgtggggacgcaaaaatggcaatgaagatcgtttaatcgggcgtaaacgtgaagtggctaaacgcatggtgggcattccgggtgatgcgccgctgcgttcagatgataatggtcatccggttaaccgggctttcatggatgtaaatcaggagcagcccgtcgtgaaagctgaaccaggctttgaaggtgaactgcatgcgttcaacctgtttggttatctctcccgttcggatatgacctgnaatccgtcagtggtttccgtggtgcgtcagagtctgttttgcccgactaccgaagagtttattcttcctattgaccacggtaatgaccgtgccgaatggttcatccagttgtctgatgaaattgcctgcgatatcaaggatggcaagagcagcagcccactggcgaaagtcaccatgcgtgcccgggatattgctgcn

SEQ ID NO: 5069 - DNA, 787 bp, Photorhabdus luminescens
caagcttagatcgaacaaagctctgtccgccatcacacccaaccatatatgcagcttgccaaacttcatctgcatactttccatcaatatgctccgcataaagttttacttcatctttatactggacaaaatctttaacgcgccagccatatcttattgtaatatttggacgactctttgcatgttgtagtagaaacctttcaacatacatttgatttgcacgtattatgggttctggaacgggatctgtcgaagccgcattttcgcgcatagacattttctccatttccgacggtaacgtaatccgtgcaagctcccatccattaaacttggtaaaatatgatacgtccaaagggaactcttttggcacgcctaatgaccgaataggctgagatatgcctacacgacgaaaatgctccataatacgggcactatgggtactgcctttaggctgccatcgggtctcttcttccaaattaaagataacggaacgaacaccatataaatccaaaaataaagccaacattagaccaacgggtccaccaccaacgatggcaacaggtgatacagaaatattttccgaagtcaaaatatactctccttaataatgattaatagcaataaatatttcagaccaaatatacccgttatctttcaagttgcctctttgttggctgcactctctcaccccggtcacagagttatctatgctcccggggattcgctcccttgccgtcgcgaacatcttgaaatcctagggtatatattaattaaaaaactatatatt

SEQ ID NO: 5070 - DNA, 696 bp, Photorhabdus luminescens
ctgccatagaacaataccaatcggcattcgttactattgcagcagcaccaattcgtccacgttgtgctcgatgccagtcaacgagcactttaatgtccaagtctgggcgttgttgtttagctgtataaagtgcattaaggatatctttccctgcgtcatcattttccagatagagggagatgatataaatatgtttttcagcgttagcaattttttccagcagggtgctgcggaacacttcaggttgataaagtgttttaacatcagcaactgactgaggtagcttaggcagttgtgcaaggtgttgttgatgtttagcttgtttgaatttagacaacatcacagtgcgctttttctcttatgttagatggctaaaggactactatgtaaagcaatgcatcaaatgatctggcgataataccattagtctggctaattgtgagcatgatttaacgctctaatgcctaatgattcaagtctgtgcggtccatcacgtagttgatttagagttcgagggataagtttacaatgctatcctcaaattgaacatctatggtaaatcccagttttttagccagttttatcatcgtacggttttctggcatggtgatagccgtgaggcggcttatgccatgttcccggtataggtatcagtttatcataagtgtatccagggtgaccctttagccaaaccct

SEQ ID NO: 5071 - DNA, 755 bp, Photorhabdus luminescens
  misc_feature (712)..(712): n is a, c, g, or t
aatggtaattgcagaaggccccagtgtcataggaacagactatattgagcaacatacacctatattagagaatatttatagtaccttaccggaaatagctaattttaactatgtcataggcgtaccaaaagacaaccaactactttcttttgttcgattaattaattggtctgaacgtcaacgttcaacaatacaattacaaccagaattgcagaatattatagctaaaatcccggcgttacagtcggtagtaatcctgccttcttccttgccaggtgtcggaggattacctttccaatttgtgctcaaacatgaagataaagattacgctaatctagatgcgcttagtgatctaatgctacgtgaaatgcgtgctagtggtctgtttctatttttgaaaaaagatttgaaatatgatactccgcagattcacatacgactagatcgtgaacaactggcgaaagtagggatttccgcttcagatgttggttatagtatgaatttggcatacgccaatactaaactacaacctttcatttatgaaggacggacctataacgtcatcatggccttgaaaaaaactgaacgggctgcgatacaatcactattagatctacaagtgcgaagtttagatggcaatcttatcagactaggaagtctggtgactcagaatcctgaagtaggtccctgaatctctaaatacattccaaanacaagctgctgtgacactacaaggtgtgttagccccgggagta

SEQ ID NO: 5072 - DNA, 685 bp, Photorhabdus luminescens
  misc_feature (505)..(505): n is a, c, g, or t
  misc_feature (606)..(606): n is a, c, g, or t
  misc_feature (616)..(616): n is a, c, g, or t
acgaatgggcgaagaaaatctcagaacatttactgccacgtacccgtgcttatgctgaactctggttggataaagaaaaagtcgcaacgaccgatgaagagccgattcttggctcgacttatttgccgcgtaaattcaaaaccacggtagttattcctccacagaatgatgttgatctgcatgccaacgatctgaattttattgctattgcagaaggtagcaagttggttggttttaacgtgttggtgggtggtggtttggcgatgactcacggtgataaaaatacctatccaagtatggcgagtgagtttggttatatcccgcttgagcatacgttggcaattgcggaagctgtggtgacaactcagcgtgattggggtaaccggactgagcgtaaaaatgccaaaaccaaatatacgttggagcgggttggtgttgagacttttaaagcagaggtagagagacgcgctggcgtgaaatttgaggcaatccgaccttatgaatntactggtcgtggtgatcaaattggctggctgaaaggtatcgatgataaatggcatttgacactgtttattgagaatggtcgccttttggactaccccggcnagccgctganaagcggtgttgctgaaattgccaaatacataaaggggattttcgcctgacggccatcagaacttaatct

SEQ ID NO: 5073 - DNA, 767 bp, Photorhabdus luminescens
tccagcgctggatttgcgcaatatcgccgtggctgtgcccctcaaaccagttgaaccacctaagcaccatccccgtgaatatgatggtagctatttctccgttgtggttagtactactactttccggccggagccgggcagtgatgatattaaccgcgcctatgaagagtgttgggtaggtcaagcaggatatcgtaaagcggatggtaattggcagcgttgggcattggcatttattggcgatactatttctgcaacaggggaaaaagtaccggaagtctatatcgttgatttacctgaacaggatgctgattatgcgatagcaggggaaaaaccgctgcaaggtacggaaacaacgttacctgcgccgcctgccagtgtaatgcagcgtcgtttgacattgaccagccacaaacgctggccgggagtcgtgaataacccgcgtcactggttgcgtgtttcaccgaatggtgaacagattggttttctaatgaaagatgataatggtattgtgcaattgtggacaatatcgccaaatggtggcgagctccgtcaaataactcagagttactgtggcattcaatctgctcttagttgggaaaatagcggtcagtttggtgcttttatttgtgataacagtgtgatgctgtgcgatgtacaaaatggtcagatgccacgtttgacaaagcgtacagaaaaagcgcctgctgcggatgcggtggtgatttcaccggatagtcatcatattgcatttatgcgtgaagtca

SEQ ID NO: 5074 - DNA, 681 bp, Photorhabdus luminescens
  misc_feature (681)..(681): n is a, c, g, or t
taaaagccactacaaccccacagtttttagggtttggtacattatcaaaagcagaatatgcacgttgcgatggttatttttatcttcataaaagaccgaataaaggtagaaaattcaaaaaatcacgatatcgaatggtgcgaaaatctcaggtcaaagatgggcgttcggcagcaatggagccttggcttatttttattagtatggatgattttaaacctcgtcaggtgatgaaaatttacagccgaagaatgcaaatagagcaaaattttagggatgaaaagagtgaacgttttggatttggtcttagagcaagttatagccacggggctggtcgtttatcagtattgagtctacttgctacactgagttcggttgtactttggctgattggtttttatgccgaaaataaaggaatacatcttaattatcaggcaaatagtattaaatcaagaagagttatctctcatctgacattagcagagaatgtcttacgccattccccgctaatattatttgaaatagtgcttaataaaaccctcaagcatctcgccaaaatctaccaaaatatggttttgatttattacgctgatttgtggggatcctttagcgctatgcaggtggaaatcaagggttataccaagaaaacacctttccgttacgatatagatgttcaagctn

SEQ ID NO: 5075 - DNA, 752 bp, Photorhabdus luminescens
ttcgagtagtgccatagcttgactgctcaacggtactatgtgcggtgttttcatcttcatcccgcgttctgaaaacttaacgttttctatggcttcgcgcttaccgggtatttcccatatcgcattatcaaagtcgaattcatcccacctaacgaaacgtagcttactggctctaacaaaggtcaataaaccaaattcaatagcgatacgtgtcacttcacgccctttaaacaaagcagtcctttcgagtaattcaggtaaccggctaggcggtaaagcaggatgatgttcggttttcgttgtagaaagtgcccccgccatatctaaagcgggattgctttcaataattccacattgcacagcgtagcgcataatagcggtaacacattgctgtagacgtttagcaacatcgaccttatcagcatcatcaacggcttttataggtacaagtagctcacgggtctttaactgacggatatcaattttaccaatatgaggaaagatgtattgttcaaggctgcgcagtacacgcgcccggttatagtcaccccaccgcttattactggagtgccatttcctagcaatagtttcaaaattgaattcgcctgatgcctcagcttgtgtctctttctgtgttgctttgggatctataccattagctatcagttttttagcctcattacgtttagctctggcatcagcaagagaaattaccgggtaaaccccaaatgctaacctgtcttcttttttaa

SEQ ID NO: 5076 - DNA, 822 bp, Photorhabdus luminescens
  misc_feature (822)..(822): n is a, c, g, or t
acttgaggctacacacctctctgctttcggctcgtatgactgtgtggaattgtgagcggataacaatttcacacaggaaacagctatgaccatgattacgccaagctatttaggtgacactatagaatactcaagcttctggttttattcgctctctgctaggtaaagcaatgcgtttgcgtgtcgtaccggaactgactttctcctacgataattccttggtagaggggatgaggatgtccaatctggttactaatgttgtaaagaatgatgaacagcgccgggcttctacggatcacaaagaggagaagtaatggggcgtcatcgtcgcggtcgtgatatacatggtgtgttgttactggataagccgcaggatatttcttctaatgatgcgttacaaaaagtaaaacgtattttcaacgctagcaaagctggtcacactggcgcgttggatccactggcaaccggtatgctaccggtttgccttggtgaagcgacgaagttttcccagttcttacttgattctgacaagcgttatcgagtgatagctcgtcttggtcagcgaactgacacatcagattcacacgggcaaatcatcagtgaaagggcaatccagctaagtcaggttcaacttgatgcagctttggataaattccgtggtgataccatgcaaattccttccatgtattctgcactgaaatatcagggaaaaccattgtatgagtatgctcgtcagggtattgaggtagaacgcgaagcacgaccaattacagtctatgaattacagtttatccgttgggaaaatgatgaactggaattggn

SEQ ID NO: 5077 - DNA, 754 bp, Photorhabdus luminescens
  misc_feature (698)..(698): n is a, c, g, or t
agtcagcacattggcaccccccgccagtaccgaggagaccttccccttacctgtttgggtcatcacattaaaaccgcctgcacctaaccaattggcgttgccattacctatttggctatgagtgttgtaacccccaaacatgctaactcggctatcgccattgccttgatggatcgagatattacctatcgccaaaagacgagccagatatcgcccatcaccgatccgaaccaatacattcgctgcaccgccggcgtaaacatccatttctccacgttggccttgatgaaccagtacgtttgccagacctgcaccacggaacgtcaaatcgccctgttccccctttttcacgatgacattagcagcacccgcgccttcaaaattgatattgccacgagttacactggaggtaatgacattgccaccgcccatgcccttgaaattaatgtcaccggagctgtcacccatatccgcggatgatttcaccaactcctgatgactatattcttctgtctgtgctaaatgttcagaaacacggcgcactgtattcacttggtattgcagattggttaacgaatatcctcctatatccattgagcgataaccattttggggggaaaccttttcagcagccagattgcttgtatgatcacccgctttgtaccacgcactggcgtaatattgcagcgcaccggttntagcatcatttctcaactcaaccatcactactttggtatatgactcaacatacttg

SEQ ID NO: 5078 - DNA, 679 bp, Photorhabdus luminescens
  misc_feature (629)..(629): n is a, c, g, or t
  misc_feature (650)..(650): n is a, c, g, or t
tgggtgcgtctggcgcgcccgtatgcgggggagaactatggttttcactggccgttgctggaaggcaccgaagtcgcgatcgcctttgaagggggcgacccggaccggccctatattgcccatgctctgcacgactcagtgcacccggatcacgtcaatctctacaactacaaacgcaacgttctgcgcaccccggcgaataacaaactgcggatggatgacgaacgcggtcgggaacatatcaaactgagtaccgagtacggcggtaaaagccagttaaatctcggccatctcgttgatagccagcgcccacacccggataaacggggagaaggctttgagctgcgaaccgacgactggggcgcgatccgggccggtaaggggttgtttatcagtgcggataaacaggcccgcgcgggcggtgaagtgctggagatggaggcggcgctgaatcaacttcaacaagcgcagaccttaaccgaggcattatacggcgcggctgaaatggctaaagcggaactggcggatttgcagcaacagaaggcgctgttaagtgaaacgttagccgagctgaaaaatccgcgttgttactctccgcgccagaagggatcgcgcagacgacggcaaanagccttcagttggcggccggnaaaatattatcgtcaccagtgggaaaagt

SEQ ID NO: 5079 - DNA, 775 bp, Photorhabdus luminescens
  misc_feature (775)..(775): n is a, c, g, or t
caccatcctgccaaccaaaaagctgtcgccacaacgtggcccaatcaatcagtgaataaaacgccgcctcagtcgggatcttgccaggggcgaagtgggtaccaagctgactgaccgtttcatctgttatctctttcaccatcgtcttttcctcatttagctagtcgtaaaggtaaactttcccttcgccacttttccagccactggcaccaatcgccaatgtattggcgtcaccgctaaaacaaacaccggcaccaaatttatggtttgattccccatccagctccagtaatttgctctgcataatccattgttcattctgatagctaaaccaccataccgcaccggtttgcacacctgtgtcatttttaccaacaggtgttgacaccaccagcatctggccgtcactactcaaagagagttcgctgccaaacctttccccggcagtcaccgcttctctcaatatccctataacttgccatacattacggtgacgctggtacagatagaccgcaccaatattgttcttctctcccgggcaccccaccgccagaatattgccgctatcgctcaggctgagactggcaccaaagtcgtctttactgatggttaaaggcgaagtcagcgaattgagtggcagttgcggttgccagtattccccgtgacgatgaaatatcgtcacttcaccattaccattacgccccgttgccgccactgccaaggttgaaccatcggcactcaagctaagtttgccgccaacatatcgccctgtgcn

SEQ ID NO: 5080 - DNA, 698 bp, Photorhabdus luminescens
tgatggatgaagaaatcgaaacttatgagcaggagagcgagattccggcaaccagcttgatgatggttggagattctcttcctgcttttggtattgtcgctgctgttatgggggttgttaatgctttggggtcggcagatcgcccggcaggagaacttggcgtgctgattgctcatgcaatggttgggacattcctcggtattttgctggcatatggttttatctcgccattggcaacattgctacgtcagcgcagcggtgaacatcttaaaatgatgcaatgcattaaagtgacattattgtccagcctgaatggttatgctccacaaattgcggttgaattcggtcgtaaaacactctacctcacagatcgcccttctttcactgaattggaagaacatgttcgccgggtaaaagcacctgttcagcaagaaactgaagaacaggtatgaaaacgcgtaacgtctcagtcattagggtaaaaagacgtaaaaggaatggcatcaaacatcatggtggttcatggaaaattgcttatgctgattttatgactgccatgatggcattttttctggttatgtggctgttggcaatttccagcccacaagaattgacccgaattgcagaatatttccgtaccccgttacaagttgcaattataaaggggagcgtgcagtgatagctcgatcctattcagg

SEQ ID NO: 5081 - DNA, 822 bp, Photorhabdus luminescens
  misc_feature (659)..(659): n is a, c, g, or t
  misc_feature (822)..(822): n is a, c, g, or t
cctttcaggcactggccccggggctcctctagagtcaccctgcaggcatgcaagctttttaatacggctttataaggggaatcgatacttttgtagagttgccataagctagcaccaaagtactcttcagcagatagctcacccaatccaccgagatcaagccactcatttggcgtcagaacaccttgcgcataaagcgataaaacatattcatcataatggcgttcttcttctacaggcaccatttcccataacaaacgcttacccgccatacgtacagcggtacgataaaattcatcaagtaacagaatatgctgagtagagccgcaatcctcaccaccgaggctaccactcgcattgtggcgaaagcggttttcatcaataagaaaaaaattgacttcaataccaagcgctgccgcccactgctcaataagcgtacacttacgttgcagcaaaaggcgctcatcattatcaagccatgactgatgacatacccagatatccaaatcagaacaaccgctctgcccgattgatgaagtactgcccattgagtaaataccggtaataggaagttcaccattggcaggctgttctatgaagtgatctaatttattttctaaatcattaagataagatttttgtgcttcatcatgcacganaaaacatacgccatagggaacattaccgttaatgtaacctggcatcatcgaatgatgatagtgcaataatactggcagtaaactgtatacctgtttaaattccgcactcatggcggtagaggcgcgttctaacctgagttggtttatcgcatccagtctctgn

SEQ ID NO: 5082 - DNA, 824 bp, Photorhabdus luminescens
  misc_feature (758)..(758): n is a, c, g, or t
aactagggtacactcttgctctggctggtatagacgtgcgcaattgtgagcggataacaatttcacacaggaaacagctatgaccatgattacgccaagctatttaggtgacactatagaatactcaagctttaagcccatgtgggataaagtactggctggccagcttggcaagtttacccttatggctttgctgacttctattaccttaccggttgcctacattatgatgcgaaatctgctggcagcgcattatagttggcgcgatgtgggtatctggcaaggtgtaagcagtatttccgatgcttacctgcaatttatcacagcatcttttactgtttatctgttgcctacgctttcacgattgcagggtaagaatgaaatatcaaatgagataattaaggcgctgaaatttgttttgcctgcggtggctattgcaagttttactgtatggctgctgcgtgattttgccatttggttactgttttctgacaatttactgctatgcgtgatctatttgcctggcagttggtgggtgatgtcttgaaggtaggcgcttatgtttttggttatctggtgattgccaaggctgcgttgcgtttttatgtgttgacggaagttagccagtttttattgcttactggttttgcccactggcttattcctgtaaatggagcgttaggtgcagcacaagcctatatggcaccttacattatttatttcaccctttgttgtggtgcatttcttatttatcgtangcgagcatgacaacccttattcacgttttgggatctgatatcccacatcacaatcgaacagtactg

SEQ ID NO: 5083 - DNA, 781 bp, Photorhabdus luminescens
aagcttgttgaatttttttggtaataggtccacatctaccgataccaacctgaatatcatcaacactacgaacgggtgtgatttcagccgctgtgccagacataaaaacttcatcagccaggtacaatgattcgcgcgacaatacctgctcacgcacttccagccctaaatctttcgccagtttaataatggcatcacgagtaattcctggtaatgcagcagaggtaaatggtggggtaaataatatgccatcttttacttcaaatagattttcacccgcaccctcagagatataaccagaaacatccagtgcaataccttcctgatacccacgacgacgagcttcactaccgactaaaagcgaagacaggtagttaccaccggctttagccgcagttggcattgtgtttggtgccgcacgattccatgaagaaaccatcgcatcaattccttgatccaatgcgccttctcccaaataagctccccacggaaaggcggcaataatgacatcagttttataaccagcaggtggattaaaccccatgccaacatcaccgataaagaccaatggacgtatataagcactgactaaattatttttacgaagagtttgccgacacgcctccattaattcatcgacactctggttcaacggcatacgataaatctttgcagagtcatgtaaacgctgcatatgctcacgatggcgaaaaccactgggcctttatgagagcatagcagcgattccctcaaaaccgatgtgccgtatttaaagctggga

SEQ ID NO: 5084 - DNA, 707 bp, Photorhabdus luminescens
  misc_feature (477)..(477): n is a, c, g, or t
cacactggtcgtagccgtaacgatcaggtggcaacagatcttaaactttggtgtaaagaatacatttcacatctccatcaggcaattgtggaattacaacaggtattggtgatcaccgcagagaagaatcaggatacggtgatgccgggttatacccatctgcaaagagcgcagcctattacatttgctcactggtgcttggcatatgtagaaatgttggtccgtgatgaaaatcggttacaggatactttaaaacggctgaatactagcccgcttgggtgcggtgcattggctggaaccgcttatgatattgaccgcgaacaactagcatcatggctaggttttgcttcagcgacgcgtaacagcctagatagtgtttcagatcgtgaccatgtattggaactgctatctaatgccagcattagtatgatccatctttcccgttttgcggaagatctcattttctttaatagcggngaagcaggatttattgaactgtcagatcgagtcacttccggttcttctctgatgccacagaagaaaaacccggatgcactggagttaatccgtggaaatgtggccgagtgcagggagcattaaccgggatgatgatgaccctgaaaggtctgccgcttgcttattataaagatatgccggaggataagaacggttggtagatgcgcctgacatttggctggatcgttgct

SEQ ID NO: 5085 - DNA, 757 bp, Photorhabdus luminescens
  misc_feature (582)..(582): n is a, c, g, or t
tatttaagttttatgtcgtaacagcgatataaatcaaagagaattcggtggtgcggtagttcagttggttagaataccggcctgtcacgccgggggtcgcgggttcgagccccgtccgcaccgccaccttaatttaggggcgtagttcaattggtagagcaccggtctccaaaaccgggtgttgggagttcgagtctctccgcccctgccagttataagctaagtggcaactaaggtagtttatagtattggtgatccatatatgctacttggattagattattgataaggcgctggctttttggtcagcgcctttttcttaatggaactttgtaagaaaaacggatttgccgttacattaaaaatccccttatgcgagccttttctccagaaatgatctcacttggaaaatttgttcgcaaatattgtctggttcgtaaagctaatgttgccattgatttgaattcatcatttcattgatgttgttacacatttttcagttctcaatgttattcgatcttatagcaataaaacctttctttctaattatctattgtcaaagtgaattcttatagataactntctagactttttggcaattttcatactagttaaagtccttctgaactaagtgtctagaggatatgtatgaatggatcttaactaatattttgattgtgaaagttctcttcttaagaaagctcgcgttgaaggaaaggatacctaaaaccgataggcggaaacactacttctgatt

SEQ ID NO: 5086 - DNA, 826 bp, Photorhabdus luminescens
  misc_feature (1)..(1): n is a, c, g, or t
  misc_feature (630)..(630): n is a, c, g, or t
ncgtagagctaccactctctgctctcggctggtatgacgtgtggaattgtgagcggataacaatttcacacaggaaacagctatgaccatgattacgccaagctatttaggtgacactatagaatactcaagcttgcataccactacccagcgctcctgccacatcagtattcaagtcatcaccaatatgtaagatttgcccaagcgctaaacccagacgatccgcggccaaacagtacatatcgctgcaaggttttgcgcgtccatcagggccagcttgcagcacaaatttaaaataaggggcaagaccacaggcggctggttctgcattgccattagtaatggctaccagtggcatttgttcagcaagtgccgccagagttttatgtgttgattcagggatatcaattcgattacgccaaagtgtgaaatgcgccatgacatcatctgccccccgatcagcgtcttcacggctaaaaccgtaatggcaaaacatcaactttgaggagtaccagcgccataaagtcatgtcatgataaatttcaggatgctgctcaagtgtcaattcacggaaagcacatagatcctgatgattaaggtggctgaacctaggatcatactgccgtacanagttcagtacttcctcttctgccttatccatgactggatgattatcatacagcgtatcatccagatcaaatgtcatcgctaacactggcgcaagaggccggtaaaacgcattacgatttcccccgtttggctctgggatgggcgacatcatacacttttgtcaaatgctggaaatctacatgagtatagattcgtg

SEQ ID NO: 5087 - DNA, 782 bp, Photorhabdus luminescens
  misc_feature (640)..(640): n is a, c, g, or t
aagcttgctgttgatctttattaagtctgggaaaaacaccgctcagcttacgcatgatagattcggtgctttctgaggcaatatcaatatcgacacccgcttgtgatgccgtttttaacagcgtctcaagagccggatcaagcgcaacacctgattttagtcgggctttagcatcattaatgcgtgaaaatgcccccacaatctcatttgcgctgacaccaaatgcttgacctgcttttgtccagccatcaagcgctttagccgacatgccgaacgcatcagcggcagtacttaactgattgagattgccggcaaaactggtcacaaaacttttcagtccaccgagtgagaccgtgacacccgccaaagccaagatctgactctttatgctggaaaagaaagaggaagctttctttcctgccgcctccatttcttttgccactttttcggttttcttaccggttttgtctaatgatttgctggttttcttttcaccatcattaaacgagtcaatcagtttttgcataacctgagccaacccaccgatcccggcaatcactgcggtttcacctgcgctaaattcagccgcatcaagccccagcgttataacaagttcatctataatgtttgccatcagttnttaccctgctgtaaaacgtaagcattgtgattatcgacctgaaaatctctattaactgccaaaggtcctccacgccataaactgtatacagctcatggagcgttgcctttcctgatgagaatacggtcgctattgtgcctgg

SEQ ID NO: 5088 - DNA, 702 bp, Photorhabdus luminescens
  misc_feature (563)..(563): n is a, c, g, or t
cgacttgattgataagtggactcctccggaaggttggttttccgatatcggtgcagcgaaagggaaagaatatctgatagactttttccgtaactgtagaggctttcgcactcactaatgacaggggcatcagcccctttcttctttaatcccctttaatatttccgtttccatacatggatgatactgaatgaaacttacagaggagtatcatcatgtcaaccacgacttaccatcttcaatttccctataccacggctgctggcgttcgcattgaagagcttcagttatcacgtttgaaagttaaagatatcaaggctgcccggcgagccagcgaaaatcctactgactgggatgatattttgatagcacgttcgacaggattgttaccagaagatatcgaacagatggatgttgctgattatctggcattacagaaacgatttcagcaagttatcggattggatcagggaaataaaaacagtgtggcaagcatcggcgatgttggcacgatggttccggttccagccgagcgagattgataatctggcgctggatgaatntgaatgttggttgaatgaggccaacacccaaatcaaacgcgagaatggaggcggttaattcgtgtcaacagaaatttccattggtgtcattattggtggggccattagtagtgcgttcagttttgcatgtctgcacacg

SEQ ID NO: 5089 - DNA, 752 bp, Photorhabdus luminescens
  misc_feature (709)..(709): n is a, c, g, or t
catttatatttaatcctagccaaaaaactttaaattgccagttaaatagttcacaaattaaattattttctgaaatatgtctgttcttggagcaggatgataacttagatattcttgcttcttgcatacacgacttatggtgtgcaaaatatttagtcgataataaaactgctatgcaagactcaataacaaaacttgaaattgagtacaacttacaggttaattttttaaaaccttatcaagcattcactgaaaaagagaagaaatttgagaaaaggttaataaagagtgacctgagtattatatcggaagtaataaaagatacttgttcatacgatgataatattgtgtctgataattttaattatgagagcttactttctacaaacgatactattttttctgatttaatgacaatattaggccacagtgacagcgtaatagaagttgcagcaaaaagaatccatgctggctggtttgatataatgaaagaattttatgcccatgatgaaagagttcaatgccaagaaaattcaaacattgataactcagattttataaaacatagggatgggatacgcattgatctcgctgctatttatattgtactgatggaaataaaatataattaccttttacatggagatttaaaatgatacatctatttctatcacctcatttagatgatgcagctttaagcgctggcggnttatacataaattagttcagaaaatcaaaggtgatattttact

SEQ ID NO: 5090 - DNA, 687 bp, Photorhabdus luminescens
  misc_feature (687)..(687): n is a, c, g, or t
aagcatttaacttcgatatattttaacattttaaacatccagagttcacggctctgggtgttttaattggttgagaaaataaatttaaaaattataaattaatatcttaactggaatatagttcaattattttaagataaattcccatcgaaataatttagccctgtcatttattttcacattaattatcacaagcctaatcttcaatcaaaaaacatgattgaatattttttcattattgctaaagtatttataggaaaaaattattaagcaaaattaaatttaattgccattcatttaaaaggactcatatatggatatgaagaaaatgctaaatagcgcagattattctgatacaaaaaacgctaataaagagctggttaatggttcatttaacgaaggatatcgtggctggagaatcccaacccctgaaactgtagaaatcctgtccgagaatggcgttaattttcttagcatccaaacctattccagctctggtgtcattgatcaaataataacagggttggaacctaacgttaaatatcgactgacgggtacagcacgcttatcgactcaactaacaccacaaagggccttgcccgcttattttggcttacagaatcgcacatttggccctgaatcctttgttgcaatagctcaattttacgaccggttcagttgaattan

SEQ ID NO: 5091 - DNA, 754 bp, Photorhabdus luminescens
  misc_feature (662)..(662): n is a, c, g, or t
  misc_feature (708)..(708): n is a, c, g, or t
tatacggattatcgataaacaaagcccgttaaataatcctgcggaccgagaccactgtattcagtacatggtggcgattcctttaatctttggtcgtcttactgcggcggattatgaagatagcgttgcggcagatcctcgcattgatgcactgcgggaaaagatagtatgtattgaagatctggattttacccgtgattatcacgatccggaaaaacgttctattgctaacgcattaactgttacgtttacagatggcagccagctcgatgaagtcaaagttgaattccccatcggccatgctcgtcgccgtaaggaaggcattccattattgctgaaaaaatttagaaccaacctggcacgtcagttccctgaaacgcaacagaggagaatcctgtctgtttcccttgactgctcgttgttagaaagcatgccggtaaacgaatacctcgacttatacgttatctgaatttccaatattatcggcggctgctctcccaaagtgccgctctatcatctacggcagaacataggagagattatgtcattcaacgctttttatcagcagtccattgatgatcccaacgctttctgggctgagcaggcgcaacgtattttctggcaacatccttttgagcaagtgctggattatagccatcctncttttgctcgttggttttgcgggggaaaaaccaacctatgctacancgcgttggatcgctggctggaagcccgcctgatgctaatgcgctat

SEQ ID NO: 5092 - DNA, 685 bp, Photorhabdus luminescens
  misc_feature (536)..(536): n is a, c, g, or t
  misc_feature (620)..(620): n is a, c, g, or t
  misc_feature (639)..(639): n is a, c, g, or t
  misc_feature (685)..(685): n is a, c, g, or t
ttggtaaggtataacgcccttccttaacatgggacaggtaggtattataacctgcaacaaatccatcaataattacctgtgaatcagcacttaattgcggccatttttcacgcgcctgttccaccaaagctaacgttttataaccgaagtcctgaattaaattcagtgagtccccctgcttatctctatcagcaccaaagaaacgcgcacgctcccctctaatgcgcacataatcatccgccataatgcatatattatcttgtgcctgagcataggcattgccaaaactcaagcttcccaagtcgtgtgcataaatatgagggacaccataatgagtacgaacaattttcgcttcaaatgctgtcttcgtcttttctgaataacttttaaatccgctacaacttattgttaataaggtaatcaacagtaatgtgattgatttaaatgatattgttttaaataatattgttttaaatgatgtcatttttattttgcccttaaagtacctgtataaaagtaatctctggctttgaatnttgattccaatattaatgctctgagtaaccaacgatcataaccatcgtatcgaggttcatactcgctgcgtgcatgagcaactntacggttatcacatagcancatgtctccaggagataaatataaagcctctctattctcattaatn

SEQ ID NO: 5093 - DNA, 757 bp, Photorhabdus luminescens
  misc_feature (757)..(757): n is a, c, g, or t
tgccgttgtccggtccccacaggagaacgcctcgttcttcaagatgcttgagattatgttgcgttgcttgagctcgaaacatttgttgattcattgcgggtacggcggcaattggggctggggaggccaaacaaagagttgttacgagatcatttgccataccgacgaccaggcgtgccagtaaatcagcagtagccggggcgagaataatcagatcagcccatttaccaagttcaatatgccccatagcagcttctgctgctggatctaacaagtcatcggaaacgggataaccagaaaccgcctgcaacgtcattggtgtaataaacgattctgctgctggtgtcatcactacacgtacttgtgcgccgcgatcacgcaggcgacgtactagctcgggagttttgtaagcggctattcctccgctgataccgagcacaatctgtttgccggaaagtcctgccatcatgattgtccgaatatataagttgcaaggggccaagattttatcacaagagattacagagttgagcagagtctgagctttgattgtaaaaaagaataagtttgcgagcggctacgcagctccggaatatgatattcgcccttatatttaaggcgtggaatactgtttgtatcaggtgaaacagagcagggagatgaatatatgggaattgatgtcgctgaaatacaggagaaatatattaaatttagctccagagacaattgttggctaatggtctgtttctttacagan

SEQ ID NO: 5094 - DNA, 696 bp, Photorhabdus luminescens
ttaaattttcacctgccaaataaaacttatggaaatagatagcaccctattaaaaaccaaatgtaatttattttcataagttttatttttaagtcatcatcttaaaaggcaaaatatgtcctcactcaacattctcaccgagaaatttgataataaaaccgccaccattgccattgttggcctgggttatgttggcttaccgctcatgctcagatataacgatattggttttaaagtgatgggtttcgatatcgataaagaaaaaacagataaactcaatcaaggtcaaagttacattgaacatattccctccgccaaaatcagtcacgcgataaagaccggttttgaagccacgacggatttcaccaacatcgcgcaatgcgatgccattattctttgcgtcccaacgccgttaaataaataccgtgaacctgatattagtttcgtgattaacaccaccgacagggtaaaaccgtatttaagggccgggcaagtcctctccttagaaagtacaacttatccgggcaccaccgaagaagagttactcccccgggttgaagaaagcgggttaaccgtcggtgaagatatctttctggtctattcacctgaacgagaagacccgggtaaccccgatttcgaaacccgcaccattcctaaagtcataggcggccacacagaatactgcttaaaagcggg

SEQ ID NO: 5095 - DNA, 773 bp, Photorhabdus luminescens
ccacacaatattgtccacacaataatgccaaaatagtactaacaaacttgtctataccctatggatttcaagatgcatcgcggcggcaagggagtgaatccccgggaacatagcaaactatgtgaccggggtgagcgagtgcagccaacaaagaagcaacttgaaagatgacgggtatataagagatatgattcatcatgttatgtacaaatattaataaggagcattgttatgtataaagcatttcaaggtaagactgctattgtaaccggtggtggaaccggtataggacgggctatcagtattatgctggcgaaacaaggtgctgctgtcgcagtgatctattcacaaagtgaacttgaagcgcaggaaacaacagaggccattatcaaggatggggggcaagctatcgcgataaaagcagatgttgccgacgaatcggctgtacaagccatgataaacaccgtcgtggaaaaatttagcgggatcgactatctggtaaataacgcggcgacaactaggcaacttcaatttgaagatcttgatgccatatctagcgatatttgggatgccattattgatgttaatgtgaaaggcacatttcattgttgccggtatgcggcaccttatcttaaagcaagaacagggagtgctatcgtgaatgtcggtagtatcgccggcgaaaccggcctgggctcttgtattccctacgccgctttcaatcagccggtcacggactgacaaatccttagctcgggcactggctccatcgg

SEQ ID NO: 5096 - DNA, 701 bp, Photorhabdus luminescens
  misc_feature (674)..(674): n is a, c, g, or t
  misc_feature (701)..(701): n is a, c, g, or t
ctttgaaggttactggcatgacgggagcgtcttcccaatccgcttcggcaatatgaatataggctatgccgatatcatttagcacactcgcggcagccagataagtggcttcgggcgtatcatcttttgaacccatcagggttgtgagtggtgccaggcgaacacctagcttatctttccctatcgcgctagccactgatgtagcgacttctctcaagaaacgtaaacgattttgtaaagttccaccatattcgtcatctcgtaggttagtctgagaatcaataaactgattaataagataaccattcgccgcatgaagctctacaccatcaaaacctgctgcaatagcattatttgctgcttgaacataatcatttacgatatctggaatttcatcaagtgtcagtgctcgtggctgcgagtgttgtaccatttcaccgataccatgttcaggtccacggcctgccacatccagaaaaacttttacaccttttgcttgaagggcagagggagaaaccggctcagaattattgggttgtagaatcgtgtgtgaaacacgtcctacatgccataattgagcaaaaattttgcctcctgccatatgtaccgcatctgttacttttttcatcctattatctgctcaggcttataaatacctggcgtccatgcatatnccttgccctgttggctgatttgtgtan

SEQ ID NO: 5097 - DNA, 748 bp, Photorhabdus luminescens
tcgctttttttgtcccagctactgtaagcgtccttaacctgattccactggacatcattgcggccttgaagatttttcagccattccgtaccgggagtgtgactcagtacccctaacgcgtcttccagtaactgcccctctttcactttcacatccgcattgatgcctgtcgccgcctccaccgtcagcgtaccgccaacatgcactgaggggattatccaagtctcctcacggtgacctttatcgcgctgtgtaataaaaaagccttttgatgtcgtgatgctctgctcaaaatcaatattgggcatcgccttgaagttcactttccctgtctggctggtgattttcgcgtttttaccggtttctatccgactcgcttccaatgtcacctcatcttttgccatcaggttaatatcacccccggccgtaaattccgtgactttgttggtcttcttgatttgtattctatgttcggttttagacccaaacactttacacgactttatgggccccaaacctttacagcttttctctgtttcttcccgcctgtagacttcttccatcgcttgcgcatagagaaagccacctgttgccgcaatatccatcacccctttggcgattaacgccgtcgcctggaataaaatactgccctgagagcgaatagttaatgcgccaccactattcagccgactggcgtgttgcgtaaagcgctcaatattcccctcgcgggataattcttgtcgcgatt

SEQ ID NO: 5098 - DNA, 685 bp, Photorhabdus luminescens
  misc_feature (681)..(681): n is a, c, g, or t
  misc_feature (685)..(685): n is a, c, g, or t
aacggtaaactccaggcgaaaagcctgacattgacacaaggccccaaccagattgatttcaaacgcggaacccttgttcccatgacaggggaagattatggcccttgggaagcgattgataccgggttattagggggaatgtatgccaataaaatccgtctggtgagtaccgagccgggtaaggttgtcaatctgaccaacctgacggcaacccaaggcgacatcagtctgacggcggatggcaaggtgactctgggggatgtacaggccaaaacggatatcaccgttaacggtaaagacattgacatggtgaaaaaaagtcatatgcaagccggtcaacatctgatattgacaaccgatacattgcagagttggggacgaattcgtgccgacggtgatgtcactattaaagcgaaaaccttgtctttagatgggggaaatatcaccgccgggaaccaggttctgctacagggaaagaacagttttacggtgcgtggcacggatatttcaggtcatgacattaccttgattgccaatagttataatacttctgtttcacctagtgacacgtcggaaagcacacaagtattacctattatttctgcgggtaatacgctgcgtattctgtctgaacagggaatatcgctttcagattccgctattaacccgggcgaaaatatntttn

SEQ ID NO: 5099 - DNA, 766 bp, Photorhabdus luminescens
  misc_feature (629)..(629): n is a, c, g, or t
taccttcgtcaaattcaccggcacgcattttttcgaacaacaccaagttttcttcaatagtgcggtcacgatatgggctatttttgcccggctcttttaacgtaccacgatattcacggatctcttctggactcaattgatcaacataagccagacctttgttgatcaattcaatagcatactgatacagcgtatcgaaataattagaagagtagcgaatatcaccgctccactcaaaacctaaccactgaacatcatttttaatagaatcgacgtattcaacatcttccttaactggattggtatcatcaaagcgcagattacactgcccctgatagtcctttgcaacaccgaagttcaaacagatagattttgcatgaccaatatgcagataaccattgggttcaggcgggaaacgagtatgtaccgatgtatgtttaccagttgccaaatcttcgtcaattatctgacgaataaagtttgtcgggcgggcgtctgcctcactcattgttttatacctcaataatgccaaaaacgcgtcacataaccgcctataatccaacaagcagtgccgagaaacaaccatttgttcgtgtaaaatggcgattcagtacaaaggtggagcgaanaaacactcaacagtagcacatgtcaacaatacagctcgctttattataattatccgtgaaaacaaaggaacattgagtaagttatgataatgaaataacccgtaagactggtttttaacccatatttcattcaacct

SEQ ID NO: 5100 - DNA, 693 bp, Photorhabdus luminescens
  misc_feature (508)..(508): n is a, c, g, or t
ccagaataggttgaacttcatgggtatccagccgagaatttccctgttccagagcctgttgtatgcactgatgggcacgtgctgtgttagctgtgatgtttgctggtagtgcgggggtttctgttaattgtttctgattgcggcgatattcaaccatgtgcatgaaagcagtaatcgcgccttcaggggtgcgataagttggaatacctgcttcactgaacagacggcgggcttcttgtgaagagtattctccgcaccaattggtaaagatagttagccattttccccgtgggtgtttacggattgtttcaatgactttggttgcagtttgaatacagggagcaattgcgctaggagagtgaataagtaacagagcatcatggtcgtggctatctagtaacggttttaacgcagcgatataacgttccaccgtggagtcatcttttaaatctagcgggttatgcagagagatagtttctgggagttgtatttttaatgctttccgtgnctcttcacctaatattgcgagcttgccggtacggcggaataacgcatccagcgccattgcggctggagagcaccattgctaacaataatagccgttctccccgaaaggtgacatatggcttaacgtttctacagcagaaaacatttcatgtgtatcttgtacgcgtaataaccctgctcgctgat

SEQ ID NO: 5101 - DNA, 757 bp, Photorhabdus luminescens
  misc_feature (757)..(757): n is a, c, g, or t
tactcgttggtaaagagcgacacggagctgtcggtaacgcgcggaatccctagttgccagggtgtgcgtgtctccagaatatctatgtttaatccaaccactttgctttggcccgatagccaaaatgttgcggcaaggctaatgcgtgccagaaggggaagaacattttcctgcgcaatatgttgcccttttgaccctaatgttttgagtaatgccatcttagcgctccgtgttgctatatagagaaaggatcagtccatagtgttgcatgcgttgtaaaaccgactgaggttcaaaagttgcatcctctccggcggcgatctctaaggcttcggtaagacatcgaccagactggagcatggtaacaaactgcatttccgcacggctgagcaacattattcgtacgtcgtcgtcaacgcggcacagtagcatatgttccggctggaatgggtccagcatcatctcgttttcactttgttggtgtgaggcccacaggctgaagacggcataatctgaactgaagagccgtaccgaaggatggagcgccatcagcaactgtgcgggatcgtcaatgggggccgcttctgccgtctgttcggcagggtccgccgcgtgcagtgattcgataaacaacatttccagccgggtgagatcgctcagccaaggccagtctgccaacggctgaaatgtcgcaatccagtccggcaattgtgcgccatagcctgccaaaacaggagagggaggcggttgttgacgn

SEQ ID NO: 5102 - DNA, 686 bp, Photorhabdus luminescens
  misc_feature (608)..(608): n is a, c, g, or t
taataggagtggaaatgcgaactcagaaacgatgtatgggatatgtagccatagtagttgatgactatgaccgcgcaattgagtattacattgaaaaactgggttttacccttgttgaggatattccacagccggggaaacgatgggtagtcgtttccccgacccagaaagcgattgcaatcttcttctggcgcgagcctccaacgagaggcaagaagatttcatcggcaaccaatgcggcggtagggtatttctttttctccagactgatgatttctggcgcgactacaatgccatgaaatcaaaaggcgtagagttttctgaggaacctcgtgatgaggtatacggtacagttgtcgtatttgaggacctttacggcaatcgctgggatctttatcagaacaagtaaggctaaaaactatcttccggctactttgtcagtatgtagccggtaactgctgttacgtctgctctagtcgctcagagcagacggtcagattcgattacattctgcgtgcggaagctgtcagtacgagtccgagttaattcagattagaggcgcagttttctatccttcattccgcacctaattcaggaataaaccgctntatattgtgcacctaataaaactcaaagctcatggtggtaagattgcattcctgtcaccattttatgttcttgaaatt

SEQ ID NO: 5103 - DNA, 763 bp, Photorhabdus luminescens
  misc_feature (756)..(756): n is a, c, g, or t
tggctaagattcgtgcatctcaatttgattttattatctctgattggaatatgcccaatatggatggtttagagttactaaaaatcattcgtgaagatgcccaattggccaagataccggttttgatggtgaccgcagaagcgaagaaagaaaatatcattgctgctgcgcaagccggggccagtggttatgtcgttaaaccttttaccgcagctactctggaagaaaagctcaacaaaatatttgaaaaactgggcctctaaggagacataatgagtgtaaatccagtcatgccaagggatgagaccattagcgccagtgaaattatcagccgtatcggccagcttacgcgcatgttgcgtgatagtttacgtgagttgggattggataaaactattgctcaggcggctgaggcaatacctgatgcaagggaacgtttggactatgttgtgcagatgacagcgcaggcggcggaaagggcgcttaattgcgttgaagcggcgcaacctcgtcagaatgagttagagtcatcggcaatatcactgaaaaagcgttgggatgagtggtttgaaaacccagttgagatgcctgtggctcgctcgttggttatagatacccggaattacctcaatacggtacctgaacatactgctttcactaacgctcaattgctggagatcatgatggcgcaagactttcaggatcttaccggtcaggttatcaagcggatgatggatgttattcaggaaatagaanaacagtt

SEQ ID NO: 5104 - DNA, 691 bp, Photorhabdus luminescens
  misc_feature (610)..(610): n is a, c, g, or t
tactcgatgtgttacagaaatctggtgctgaagtcatgatgttacgcgctgatgttgctgatgatgcggcattgactaaagcactggcacagatgcgggcaagatttggtgctatcaacggtgtgattcattcagcgggtattgaagccagtggattgctggagcatggcacgtcgcaggactggcggcatgtgatggcagcaaaagtaagtggtacacagcaattgatgacggcgataagtcaggaccctctcgactttgttctgttgtgctcttcacttgcctcattggtaggtggaatgggtcaggcagactacgcggcggcgaaccgttatcttgatgccgtggcgcactattggcgacagcaggctataccggtaacgtcagttaactgggatacctgggcagaagtggggatggccgtggattatgctgcacgccgtcaagaaagcgtgatcggtctcagtaatcaagagggctgcgctattttcgatctggcgatcgctggaatggaagcacagatcgttgtcaataaatttccccctgttcagcgcacacaattacaggatttatcagtgatatctgattccgccagcccagaggaagcggntcgtcaattgtggtatgagctactgggcgaaggaccattcacttggaagatgatttcttcgaactgggccgtcattcactg

SEQ ID NO: 5105 - DNA, 776 bp, Photorhabdus luminescens
  misc_feature (776)..(776): n is a, c, g, or t
aagcttatctccaaactgttgtctaacttcttctgctgttctgcatggttcaaggccattcaaatttgcactggtcgacaccaacggtttcccataaaaagtacataactgtttcaccaaaggatgatcactaactctgacagccaaggtagcgaattgccctgtcaaccacttaggtgcactaaatttggcaggaatcacccaggttacaggccctggccaacaagcaaacatagcttttttttgttcttctgttagaagtttatcatcaagatacggttgtaattgttcataattatctgcgataagaatcaaccctttctgccaaggacgtttctttaatataagcagttcatttactgctttttcactatcaggatcacatccaagtccaaaaacagcttcagtcggataggcaatcactttttctgcttttaatgctgttaatacactctcaaatgcaggtgatgcttcattgctcattttattactctgcttaatttatttgcccgtttccacacaacttactagcacaaaataactttacaccttgtgatgtacgttttttcactagccacgaataagaacaaaactcacatttacccgcgattggcttattatttaatacaaactgggcattaagggaacggttacacgcatggaaaattttccgaaacgtgatttcctttggagtaggtggcccttgttacattgcggacaggctattaacgtctcatccgggttatcaattagtcctggatgtccgcattacgaan

SEQ ID NO: 5106 - DNA, 672 bp, Photorhabdus luminescens
taagagattaatcaggtgtattattgtaagccacgagcgatattattttgtgcattcgttgattaatgactttattactgggtacaggcacttctacagagggagcctaacggaaataatttgtgaaaaattcacagaagtaaacttttaagttaatttaatataattacttaattacgaggctaaaccatcggcgtcgatatctattcgtaaaaatgaacaagggcggtttcccgccctttacagactcttaagcgggtttcagcagtagatcaaagaatgctaatctgcgttgacatggtatttcgaggccaattagcggaagtgttctggtagctgaagataccgttctggtagccatcgaggctgtattccttaaggaaaccaaccacaatttggcccgcagcacatggccaattgtagtacccgtttgtgatgccaacaggtgtaaaagaatacagcgagtatggcattgccccgccttcatcccagccaaaggattattgccgtacccactttcataacgggggggcggagctggtgtccttcatgattgcagtttgccaccggcaagttgaagaggtttcccttccgcaattgttgagccaccggttaaaccccttttggcaacggaggtgcagggcgtagctaccccgaattatgtcacccttt

SEQ ID NO: 5107 - DNA, 766 bp, Photorhabdus luminescens
  misc_feature (38)..(38): n is a, c, g, or t
  misc_feature (107)..(107): n is a, c, g, or t
  misc_feature (269)..(269): n is a, c, g, or t
  misc_feature (276)..(276): n is a, c, g, or t
  misc_feature (471)..(471): n is a, c, g, or t
  misc_feature (477)..(477): n is a, c, g, or t
  misc_feature (511)..(511): n is a, c, g, or t
  misc_feature (750)..(750): n is a, c, g, or t
aagcttgccttctatgttaaaacccttagggaggccgntgtaataaagcataatatcattcgcatagacgaatcgagattcgttgtcttttatgatccaaaagtcgntgctgttttccatgtatgaaatgaaggcgtcaaagctttttgaatgaacatccagatctttatttacagagaaactcataattttatctttcataatttcacctatcatgattaaactgtaaaactgtaaaactgtaaaactgtaaaactgtaaaactgtanaactgtnaaactgtaaaactgtaaaactgtaaaactgtaaaactgtaaaactgtaaaactgtaaaactgtaaaactgtaaaactgtaaaactgtaaaaacttcgatgtaaggttatcacttttacgacgcaatgagtaattatgtttttaatgaagaattacaatatggaatgtgaaaaaattcgctgttcatgtaattggnttaatnaagtgtgaaaatctgacgtgtgtattgattttcnctcttgtttataaccgagcagtaaaataatttcatagctcgtggccctattctcttaggttaaataatgcggatgatcgcttttagtgccatttgaaagataacgggtatagacagcattaatctaatgacagaagttaaagcatttaacacggttaacccgattagctgcgaataaaggagtaaaaatgtttatttaattacattaacaacgattaaaggaatgatgggtgttttaanatcattactatccctg

SEQ ID NO: 5108 - DNA, 688 bp, Photorhabdus luminescens
  misc_feature (99)..(99): n is a, c, g, or t
  misc_feature (117)..(117): n is a, c, g, or t
  misc_feature (172)..(172): n is a, c, g, or t
  misc_feature (229)..(229): n is a, c, g, or t
  misc_feature (277)..(277): n is a, c, g, or t
aaccaaagcatctaacccgaatgtggggaagacttttatcaggtttcctgtagctaaaagaatgtacataagggataaactccgttcttatatccggcntacctaatccgataaatnaattctatgctcgctttctttattacggatattactaatgcgcttcccctttttnctttgtaatatttaatactttcacatctgcctaatctggcctgcccccttatatgtntttcacaatagcttttctacgtcactgactcatcacgttttaccgcanaaaatatacgaacatctatctatacccgtcatctttcaagttgcctctttgttggctgcacttactcaccccggtcacatagattacctatgctcccggagattcattaccttgccgtcgcgatgcatcttgaaatccatagggtatacatatggaggtcaatcgatcttatgaacaaaaaagcacaatattcatccactctggaacatagcacataatacacgtttttattcatccttacagtcactggatttttcgttggcgccaccgaaattatgttcgtatccatgcttaccccttttggagtcgcctccgggacaacggcgatcggagcatcctggctagtatccagctatgcattatcttacgctatggcagcacctatatttgggtgtttttacaatcgcttaa

SEQ ID NO: 5109 - DNA, 747 bp, Photorhabdus luminescens
caactggtgctgaaatcatcgctgttaatttttgctctaatgtggacaagcccacccccaagacataaaaaaagggctaattagcccagtagttctgttgtcaaataacaaaaaaccccgaaattcggggctttatgcaactggaccctatttgctgccagtggcttcaaccactcacttcatgcccctttaaatcagaatcaatatttcaaatattgctgaattatttcgttcaaaaaggtgcatctcaatttaagaagcggttgcgggagccggatttgaaccgacgaccttcgggttatgagcccgacgagctaccatgctgctccatcccccgttcgataacgcggcatatattacgccgatcgctgcaaaaacgcaagctattcgaataatgggacccaggacgggacttgcacccctagccctattgtgggcactaccacctcaaggtagcgtgtctaccaattttaccaccttgggactacatgaagctatcactgattaaacagccccatcttaattctttcctgcgacgactactgaggaatttcactctttggcgccgccggtgccgccggaattcttcgcgacttctcgactttagcaggccttgcaatggtttcccacttactgcttgcaccaatatggttactggtaatcttggcaagcaccccactacttttgaacaacagagtggcgaaagcgccggtctaccagtcatacagtcacccgacacctttgact

SEQ ID NO: 5110 - DNA, 694 bp, Photorhabdus luminescens
  misc_feature (677)..(677): n is a, c, g, or t
  misc_feature (694)..(694): n is a, c, g, or t
aagtgttgttacgcaatgatcctatgttcaaacccgtactgacccgtaacggagactattttatttctgttgctggtcgttctgaggttgcacgtaaacatagcgcaaatatgctgatttctattcatgcggatgccgctcctaatcgtagtgcgcgtggtgcttctgtttgggtgctgtcaaacaagcgtgcaaacagtgaattgggtaattggcttgaacagcatgagaaacagtcggagttactgggtggtgcaggtaatgctctggcaaatggggctgatccttatctaagccaggcggtgctggatttgcaattcggccactcccatcgggtgggctataacgttgcagtacaggttttgagtgagccgcgcaaggtcggtttattacataaacgctcgccagaacatgccagcttaggtgtgttacgagcaccggatattccttcaattttggtggacacaggatttatcagtgactcggcggaagaagcattactgggtcctaatgattgggaggataagctaccaagtgctattcatcggggattgcgtaactatttgctggcaaatccatggcatgctggacctaaggcgcgcaagatggacaggttaaatttggtgtgcagatcttacctgctcgattagaaaccaagttgggctggcgaaaacggnaactcctgcctgactgn

SEQ ID NO: 5111 - DNA, 768 bp, Photorhabdus luminescens
cacaccacgtggcaagatattgcgaaattcgcaaaattcacgcatcgcatccagtaacccctgacgcaacccgtttacatgtgttcccccctgcatcgttgggatgaggttgacataactttcagccagtagctctcccccttccggcaaccagagtaacgcccagtcaaccgcttcggttgcaccactgaaagtaccgacaaaaggcgcagccggcaatgttgtcaggccattaaccgcagccatcaaatagtcggtcagaccatcggcataacaccatttctgttcagtaccgttgatcttgtctttaaaaacaatttccactcccggacataaaacggctttcgctttcagcaaatgggtcaagcgggaaacagagaaacgagggctatcaaagaaactttcgtcaggccagaagtgaacaccggtaccagtgttgcgtttaccacaacttcctattactgtcagctcctgcactttatcgccattctcaaaagcaatctgataaatctgactgtcacggcgaacggtgacctcaatccgcttggacaaagcgttaaccaccgagatccccacaccgtggagaccaccagaaaactgatagcttttattcgaaaatctaccaccggcatgtaagcggctcacgatcaactcaaccgctgaaacgccttcttctggatgaatatcaaccggcatgccgcggtcatcatcaatgacctccagcgactgatccgtatgaaggatcactctcatatgtttagtgtgacc

SEQ ID NO: 5112 - DNA, 699 bp, Photorhabdus luminescens
  misc_feature (629)..(629): n is a, c, g, or t
  misc_feature (673)..(673): n is a, c, g, or t
tcaaaaatcgaatactcagctctctttattgacagaagttttggcgggggcatgggagaggctggaaacgggtcgggcggatattgttattgcaccagatatgcattttcgcgcatcggcagaaattaattcacgtcagctttacagcattaccaatgtctatgttgctagccctgatcatcctatacatcaagagccggagcctttatctgatgtcacgagagtgaagtatcgtggtattgctgtggcagatacagcgagggaacgtccggtattaacggttcagttgttagataagcaacagcgtttaacagtaagttctctggaagataaacgccgtgctctcttggctgggttgggcgttgctaccatgccttatcctatgggggaacaagatattactgaagggcgtttgcgggtgattagctctgatatagccatgagacaaatgtcattatggcatggcggcgagacagtatggcggaagctaaatcttggtgtttgcgggacatccctaaattgtttgttagtcggtaagtagaagcgatgtgagcaatcaaattagaagacaggctgtaaaaaaacatgattcgatgattgcttagcgaaatatgaaattatggcacacngaatctaactttcgaaatggcgccagccagtacagcagactgtntggttggctgagttaatctctctgag

SEQ ID NO: 5113 - DNA, 764 bp, Photorhabdus luminescens
aagcttgattccatctctgttgctaaatcatattcagaatcacgggtcattttcattgaataggcgttcagtgaatcataatcgaaaaagcctttgaaaatttcatcaagacaataacgcataatattgtctagcaggatcattgacttgcggcggtgtggcatttcgggcggcaagttaacaaaacgtggcaccttatctgacggaatttctaatagtgcatattgaatattctggctgtggacaatttcaactgccagataagtgtagtcatcttttagaaattcaaccaggttggtttctggattgatcagaattggtgtaatgtgtggccgcagatgttgacgaaaatattggcgtaaccagatttgttgattgggtgaaatttgtcgttcattgatgagaaaaatttgattgcgagcaatttctaataacagttcattatagagcacatcaaattcttgatcggttttagccactttagcttgaattttttcaatacatttcgggcgctggtggctgatcctcgttcttcattaattaatattcgtcggtttacatcagcaaaacggactttgtaaattcatccagattattggagtaaataccaaggaaccgcatccgttctattagtggattgctcttatccgccgctttttgaagcacacgttcgttgaatgataaccaactaagttctttatcggtatagaacctgtcttgagacattgttacttcaggtgttgaggtaaagctttgaactctga

SEQ ID NO: 5114 - DNA, 687 bp, Photorhabdus luminescens
  misc_feature (345)..(345): n is a, c, g, or t
  misc_feature (496)..(496): n is a, c, g, or t
agtcccgtttgatagcagcctcggctaactcacggcgcagcggttctgacacttcagcccagtgcggaatgcgaatgcggcgcaggtactgagcttggaagcgtaggaatccaccccgcattttcgttgaataggtcgccacaaacagacgagtgaccgcggatagcaggacagcctgcaaggcccgtaaatcccagtcgtctgacgtgacgtagtagaggttgtggtgaggatacagttcaccattttcatagacgatatgcgcctgtcccttgatatctggaatcaggagctttggcctcgcagccaacgacggcgtgatgcggtcaattgtgcgataccagntggcccgagctttctgcgcacagtgacgcccagcgatcacctctcgtcgagcctcaaggtagcgccgcagacggtgatactcgtcaagatcgaccagtccgccctgctcagcaaaggggttgataacacccaaaccgcgccactccacttngccggtcatgatgtctttggttgttaccagcggcaccttccggtctggctcaacattaagcgcgtcgaaatccccgataaatgctttgtccgcgccagtcgcaacaccgatcccgaccttacaccctgcctcttccagcaggggaaagtccccctccagacagcgaattaccgccatctggtcgaatgact

SEQ ID NO: 5115 - DNA, 754 bp, Photorhabdus luminescens
  misc_feature (599)..(599): n is a, c, g, or t
catgggtacgaatagtgatttttgtaatgtcattgatagtcttaccggcgtctttcaattgttgatgcagactgatcgccgcttccaccgcagtttgcgcatgaaattctgccgggaaagcgatcttgaacagcacgttttccatcacataagcgccataggcacgctggaatttaaaaggctgaccattgaacaggacatcatagaatccccacgtttttgcagttaataccgagggatatcccatttcacccttttgcgccatcaaagccaagcgaaccgcgcgggatgttgcatcaccggcagcccaagatttacgtgagccagtattgggagcatgacggtaagttcgcaatgattgaccatcaacccaagctagcgataccgcgctcaagatctcttcccgattcaatcccaacatttcagcaacaacagcggtcgaagccacttttaccagcacgacatgatctaaaccgactttattgaatgcattctccagtgcaagacatccctgaatttcatgcgctttaaccatccccgtcaaaacatctttgatcgtaagccggtttttcccaccagcaacggcatttcttgatagncagtcagccactgctaagatgccaccgaggttatcggatggatgcccccattcagcggcaagccatgtgtcattaaaatctagccagcggatcatcgtaccatgttaaatgccgcctgtaccggatcgagttgaaactgggttcccggtcccgca

SEQ ID NO: 5116 - DNA, 685 bp, Photorhabdus luminescens
  misc_feature (539)..(539): n is a, c, g, or t
  misc_feature (684)..(684): n is a, c, g, or t
tcaaagtcagtcaaacagaacgtgattcacccttacttatctcattgtttaactttgcaagagattaatgagctggtgcgtaaagtatcgaatgcctatatcaaacggggttatgtcacttcccgtgccgacctcaaagcgcaggatttatcctccggtaccctcatgattaccgtgaatgaaggcaaaattgagtcaatcagccttgatgatgaaacaccatactcactcaaaatggcctttccgggcatgattggcaaaacactcaatctgcgagatattgaacaaggcatggagcgcctgaaccgcctgccctcccaacaggtcgccattgatattcagccaggaaaacaacccggttattctgcggttatcttaaaacgaacctcgacacgtttaccgatcagtgccagcttgggtggggataacagtggccagaaaagtaccggcaccgggcaaatcaatgccagtgtgaacctggataatccattacatctcgctgatcagtggtcattgtctgccagccataacagtgattntcgccatagccaccaaaaccgaagcctcacttctaatgtaacgatcccttatggctactggttgttcagttatcagtatgcgtggaatgactcttttcagaatattccggctgactcgcaagcctatcgctacgaaggcgacagnc

SEQ ID NO: 5117 - DNA, 756 bp, Photorhabdus luminescens
cttggtgttcacctggtgtataaggttcatagtgataagaaaactgttcacgggctttttcagacgactcatagcaaccgacgccaaaccaagcaaagaaagaagcgcctaataccgtcgtctctgcttcattaagtacttttatgggtaggtttaaaatatctgcttttatttggttccaaagataatttcggctacctccttcccactaacaccaattcttgagcatgaaatccgcttattttttctaaaagggataggttttgttttaattgataccccaacgcttctaatgcagcacgataaaaatgacgtcgttcagtattcaacgttattccacatcatcctgcctcggaggttaacaaacgacaattcattcttaagttattagcgccgggaggaacggataaagcttcatggatcattttaagataagcctccgaagggggaataccttgccagaaaaactgtctgatccactcaagcactccagaagccagattccccaagcctaatggagaagaagggcttgttccaatacagagatccgggcatagatcaaaaaaacacacatttcccaccataaaatggatataacaactttatttatccacagccaaccattaatttttataggtggtattagtctgctaagtaacctaaggtccttttttaatccaaaaaccgtttacttgcgctgccacaatttgctccctgtttgtaaagaaatttatacatccaacagattcaattatt

SEQ ID NO: 5118 - DNA, 682 bp, Photorhabdus luminescens
tggcagtatgaattgggtgattacgccaccacgtttattcagaccggtacttggaatgaccattaccgtggtttgcaagtgggagaaactctgcaactcaatttgctccaaatggaagcggcatatttagttcgtcatgagcgccgtcttaatgtgatccgtactgtgtcgctcaaaagcctattgggtgatgatggctttggtaagttaaaaactgagggcaaagttgactttccattaagcgaaaagctgtttgacaacgactatccggggcattatttgcgccagattaaaaccgtgtcagtgacactgccgacgttgatcgggccgtatcaaaacgtgaaggcaacgctcacccagaccagcagtagtacgctgctcacagcagatatcaatggtgttaaacgtctcaatgatccgacaggtaaagagggggatgcgacgcatattgtcaccaatctgcgggccagccagcaggtggcgctctcttctggcattaatgatgccggtagctttgagctgcgtttggaagatgagcgctatctatcgtttgagggcacgggtgcggtctccaaatggacgcttaccttcccgcgttcggtggatgagcatatatgcaataaaacactgtaggcgcataatagctgcccgccccactgtcgacattattgatgatgtactg

SEQ ID NO: 5119 - DNA, 761 bp, Photorhabdus luminescens
  misc_feature (678)..(678): n is a, c, g, or t
caaaaaaagccctcgcccaataacgggcggggtgagtagtagaataacttattgtaactgagccagtaataatggccagcgtgcttcaaattcctgcgttggacgatagtggaactcagagcgtacaaaacgtgaaagcatcccttcacaaaatgcgagtaactgagatgctaataacgactcatcataactgaaaccttgtccatcacgtaattttttctcttttaaaacttggcggatctgtacttcaattcgttcaaataactgatttatgcgcccttgcagccggttttgttcaaacattagagcatgacctgtcatgatgcgggtcagaccgggatttttttctgaaaaacccaagatcaggaccaatatcaggcgaatacgagttatggtatctttttcatcttgcagaatcaggttaatccgtgaaattaatgagtcttcaatgaactcgatcaagctgtcaaacatccgggttttactaggaaaatgccgatatagggcagcttcggaaacacccacgttggcggccagtttagcagtagtgatgcgatggctaccgtcactggattgcaacatatgcgccagcgcctgcaagatctcctcgcgtctgtttcttttctttgtattttcgttttctgccatgtctgacaagacctttgttaagaacagcanaacaaacaaatcagtaattctttgctcaagggtattttgagcaaagaatatgatatgggttatacccggcatctttcaagttg

SEQ ID NO: 5120 - DNA, 693 bp, Photorhabdus luminescens
  misc_feature (693)..(693): n is a, c, g, or t
ttgctaaagagcacagttatacaaaattctcaatggttcgctttggcaacgtccttggctcatccggttccgttgtccccctattcgaaaaacagataaaaagtggtggaccgataaccctcactcacaaagacattacccgttacttcatgacaatcccagaagcggctcaattagtcatccaggcaggagcactgggcaataatggcgacgtctttgttctggatatgggagaatcagtaaaaatttatgatctcgcccggaaaatgatccatctttccggcctgacagtgaaagatgaaaccaatcctcatggtgatatcgaaatcaaaattaccggattaagacccggtgaaaaactttatgaagaactcttaattggtgataacgtctctggcactaatcacccaagaatcatgacagccaatgaagtttttctgacctgggataaattaaacccattattaaatgacttaaaaacatcttgtgaaaattacgattttgaaaatattaggcagatcctgattaatgctcctattgattttcatcctaaagattatatttacgatcttttaaaataatacttacaaatacactcatgtcatgaaactggctgaaaatcatattaccgacattagccttctagacaaataataatcctatgaaatttttacacacgagaaataaaaatcn

SEQ ID NO: 5121 - DNA, 755 bp, Photorhabdus luminescens
  misc_feature (718)..(718): n is a, c, g, or t
ttttttacactcgttccagttattactaaaccaggaatacagtgtgatctcactatttggagagcaaatcgtgtaaggtagcatatcatattaatcctatttaaaatggattagctaaactgcctacgtcattcattttccaaagttattaattgagtaaattaccaaaactaaaaagagcagcacgaattcgaaatatctggcactatttcgatactcttaaaatagatttaaaccgtatatccaagtaacttggatatgtatacccgttatctttcaagttgcctctttgttggctgcactcactcaccccggtcacatcgttatctatgctcccggggattcgctcccttgctgtcgcgatgcatctcgaaatccatagggtataggttttagaatttgtaaacggttagtaatcccaaatgctagtgaacgctaacactctggtaaaattacatttagtaaatcgatctattgctattatgaatatcttattacataaatcagaaagactcaatactcccacataattgagatgaataaaattgccgtttgtctcaaatgctttatctttaacttttttataagaagtaatatattcagttaaatagttaataagctgtatgatttgatagattgaaaaactattactgacattattatcagacttatttttcatattttagataatatttgatatgcctaataatggtcgttntataaatttatcatacttgaaaacatgagtgtactcc

SEQ ID NO: 5122 - DNA, 682 bp, Photorhabdus luminescens
  misc_feature (443)..(443): n is a, c, g, or t
  misc_feature (682)..(682): n is a, c, g, or t
cgaatgtcggtaataatgcacaaatcacttataatcagttctctggtccgcaccctgcgggattagctggaactcatattcactttattgaacccgtcagtgcgactaaaacggtatggcacctgggatatcaggatgtgattgcgatcggtaaattattcactaccggtacactttatactgatcgtgtcattgcattggccggtccacaggttgagaaaccccgtctcatacgtacttgcttaggggccgatctgcttgagttaactcagggtcagcttaaacagggtgaaaaccgtattatttcaggttccgtattgtgcggtactcagtcagatgaggttcatcactatcttggtcgtttccacactttggtttcccgtttgcgtgaaggtcgcgaaaaagagctatttggttggatcatgccgggcatcgataaattntctatcacccgcaccaccattggtcatttcctgaaaaataagcgctttgctttttcaaccacatgaatggtggtgaacgttctatggtaccaattggtaactatgagcgtgttatgcctttggatattatggcaacgcatttgctgcgggatctgctggcgggtgataccgatagtgctcaggcactgggttgtctggagttagatgaggaagacttagcgctttgtacctatgtctgn

SEQ ID NO: 5123 - DNA, 764 bp, Photorhabdus luminescens
  misc_feature (718)..(718): n is a, c, g, or t
ctggtacacggattaatgtcaccaaaggactattagcattaaataactcaccaacttctgccggaatcggcccaacttcccccgcgacaggtgctttgacctgcaaatcatgactctgagtttgtaactcaatcagttgctgttcagcctgacgcaaagctgctgcatatttctggcgaagctcaatcctgtcaccatgcataccttcatccaatgccgcttttgcactctgcattttctgataggcaacatccctacttctatgggcattatctagatcgttgcgtgaaacataacctttagacgctacgctctgaatacgatcatattcacgtaccgcattatcatattcggcctgagcttgtgccaaacccgcttccagattccgaatactttcttcgcgtgttccatgcagagattgctccaactgcgctttggcttgatcacgagcagcttctagtgaagcaacctgggccagcaattccgggctttcgagtgtaatcagcaactgtcctgccttaacatcatctccccgttcaacatgacgtttgatcactcgtcccttagctttagatgccacaatcacttccggtgcatcaacttcaccttgcaacaacaaatattggttatgggaacgaaataacacagccattgctgtaagcaaaatcaccagtaaaatcgtaaaaagtgttctttttttcatgatgtcttacacatncaaaattacccgacccgaaactaacgctatagcttctcattggtct

SEQ ID NO: 5124 - DNA, 690 bp, Photorhabdus luminescens
  misc_feature (537)..(537): n is a, c, g, or t
gttgggctgcgggtaaggtactggctcgtcatggttctcgtaagatcattatcggtaaagatacccgtatttctggctatatgctggaatcttctttagaagcaggtttagctgcggctggtttatctgcttcgttcactggtcctatgccaacacctgctgttgcttatctgacccgaactttccgtgctgaagctggaattgttatctctgcttctcataatccttattatgataacggtattaaatttttctctattgatggtacgaaactgccggatgatgtggaagaagcgattgaagctgaaatggaaaagccactgacttgtgtggaatccgcagagttggggcgtgcaaatcgtattgttgatgctgctggtcgttatatcgaattctgtaaaggtacatttccaagtgagcaaagtcttaatggattgaaaattgtacttgattgcgctaacggtgcgacttaccacattgctccaaatgtactcagagaactaggggctgatgttgtgacgattggctgtgaaccanacggtatcaatattaatgaaaagtgtggtgctaccgatgttcgtttgttgcagcaacgtgttgtagaagagaaagcagatgttggtttggcatttgatggtgatggtgatcgcgttattatggttgaccatttgggacagaaagttgatggcg

SEQ ID NO: 5125 - DNA, 768 bp, Photorhabdus luminescens
aagctttatacctttaggcgttcttaaaaacagcgcaaaaccaattctatcctccaaaatacgaatctgttgactgaccgccccaggagatacacccattgcagccgccgcagctttaacactgccccgtcgaccaacttcagtaaaagctctgagagctaacagaggcaaaatagaactcatattttattctccagtgtgcactgtatgtcctctatacccttggatttcaagatgcatcgcgacggcaagggagcaaatccccgggagcataaagaacgatgtgaccggggtgagtgagtgcagccaacaaagaggcaacttgaaaaatgacgagtatatatgacaaagatactaccatgccaattacagatatcaatatataaaactgaacttcaacacccatacgggaaaatggtaaatgtaaacagaataagacatgcaaatttagaaaaactacggttggcgtttaaataatatagctttaattcacttacttttaatgctagtttctcgataattattaataactgaaataattattcaagtcagctaaatgttaaaatagcattgaggatttattatgttcaattattcaaagcataagacgtataccaatttattcaaggagaacaaaatcagcatcggcatgtttttacctctcagagcgttaaatcaagaagctgatattaaacctgaaatcgatctcattcgtgaaatcgaacaacaaaacttttccgccatttggctaagagatatcccgctgtt

SEQ ID NO: 5126 - DNA, 688 bp, Photorhabdus luminescens
  misc_feature (602)..(602): n is a, c, g, or t
  misc_feature (688)..(688): n is a, c, g, or t
aatcctccttgcacaatttccagacaggcattatccgaaggattaccggcgatccggttggcacttctcagcgctgttttatctagcgctccggcagcggaaatacctaaactagcctgtcctgaacggcctaaatcctgaaaaagtgtttgtattccagtggttaggatttccagcgaggcgtgtttatcaacttgcgaaggtagaacgtcctctatgggggcaacagggatttcggctttagtgatagagattgctgcgcctttgcgttgatctctgaaacgtacccggaaaccgggttgtaacagggaagagggagaacgtgagagatcccacatgcgttctggcgtgataccgatgatttgccaacctcccggagtggcttgagggtatattccactgaattctccggctaggccgactgatcccgcaggaatgcgggctcttggggttgtcctgcgaggaacatgtaaacgatctgactctgcgactaaataggcaaatccgggggcgaatccggtaaaagcaacggtgtactcgctttcggtatgccgctgaataacttcctgtgtggtgatactgaggatttctgccacttcttncagatcttcaccagtgtaatacaccgggatttcaacgagtttcccggttgtcctatccagtgtattcaggttgcggccgttgattn

SEQ ID NO: 5127 - DNA, 682 bp, Photorhabdus luminescens
  misc_feature (533)..(533): n is a, c, g, or t
gtccggtgttacaaaagctaattgctctaaaggggtatgacgaaaaggcccgccagatcctgtcaaaatgatattagcaattccatattgttttagatctccgcgcccaaggtttcgttgtattacctctggtaagctctggaaaatagcattatgctcactgtcaatgggtaataattgagcattatgtttcgctacagcatccataaaaaaccgaccgctggtgatcagcgactctttattagcaagtaaaatctgtttacccgcccggatggcagccagcgttggcaataaaccagccacaccaacaatcccagacataacctgatcaacatcattcaaagcagccaaatcacacgcagcctgttccccgaaaaatacctcggttttacaaccttgttcaataagcagctgacgcaactcttttgcggaaacttcatctgccattgcagcatattgaggccgaaactccagacattgctcagccataacttggatattttttccagcggcaagcgctgttactttgaatntatcaggattattgcgaactacagtaagtgtacttttgcccacggaacctgtggaacaaggatggtcaaccttttcatactgatgctctgaattgttttatctgatgtgtattgatacttgtctgattcgcctggctatgaacgctcat

SEQ ID NO: 5128 - DNA, 762 bp, Photorhabdus luminescens
agcttgtatgacccacaataaaatagacaatagcggctaaaacaaagccgggaatagtggtatacatcaaatgttgaacatgactgtaaagatcagtatcggcaacgatggcagcaaagtttgttgagtcagataacggtgaaattttatcgccgaaatacgcacctgaaacaaccgctccggctgccgcggccaaagatacatcaaggccagcagcgacgcccatcagagcaacccccactgtgccggctgacccccatgacgtaccggtacaaaccgagataacgctcgtgataaaaaaagccgcaatcagtatgtattgggggctaatcagttttaacccccaatacaccatatacggtatggttccgctgaacatccaagtcccaattagcccgcctacgcaaatcagtatcatgatcaccggcatcgctttagccagctttgtcacaatagcatcgataatgtcattccaacgataaccttgccaatatgccaaggtagctgctattgctgctgatatcaataatagggattcgatgcgtaaattcagttgaccatatccaataactaacaataagagcattgctgcgattggcagtatagcgagtccccaattaagcttttttcttgtcatccatattaaaactccagtttcagatgggttgttgtaaccgaatagaataatgcatttattttgaatgaaatgtgacacatattaccttgttactgtattggtttcttagaagcgaacagtgatct

SEQ ID NO: 5129 - DNA, 674 bp, Photorhabdus luminescens
ggcgtaccgagaggtgcgctcttatcaatggataccgttatttgatctcgtttttaaaatccactaacaccaccaaaggtatagaaaaacgaaaatatcaaattaagatttcagtccttaacaggcagaatgtgttaaggaaaaaaagcattttcctatattccggtgtttggtttttgataatcactggggtgacctttttattaaaagaattgcccttgagtgacagaggcgtaaaaggcgatggtagtaaactgagtcccttttctgcgggggtaacccgtttgtttgactacttggtaattcaagttggtctgattgccctctctagtaggagtaacccatggatgtgatagccatcgtcaatcaagttttggctgaatttgctgctaaattcggcttgccgcacttagctttaaattatgaaggtgtggctgctctctgttttgatgagcaccttcacctctctttgatctttatttctgaacgtgacccgctcgtttacagattaatgtcgtgatattactggggcggagaagagaatttccgtcaaattaccagtttaatacgtaatgggataagtttgaactttacttaggttttaataatcaaccctgatgggccacttttccggaaatgtcaacaagtcgctaatcagctgttttgaagaagtt

SEQ ID NO: 5130 - DNA, 765 bp, Photorhabdus luminescens
aagcttatattctgcaaaatgaagatcatcgtatcgtatttgttattccttggatggatgaattttccattatcggaaccaccgatgtggaatatcaaggtgatccaaaagaggcgaagattgacgatcaggagattaattatctgctgagagtttataacgaccacttcaagaaacaacttaaccgtgacgatatcgtctggacctattctggcgtacgtccactgtgtgatgatgaatccgactcacctcaggccattacgcgcgactatacccttgacatacatgatgaacagggcaaagcaccattactgtctgtgttcggcggtaaattaactacttaccgtaagctggcagaacacgcaaccgaaaagctcatgcaatactatcccacggccggaaaagcctggaccagaaatggtcagttaccggggggtaatttggaaggatgcgatcgtgatggttatgcccgtttattgcgtaaacgttacaactggttaccggaaggcgttgctgtacgttatgcgcgtacttacggcagcaacagcgaactcattctgcaaggtgctaataatctgaccgatctaggcgaatccttcggtcacggcctgtatgaaacagagcttcgttatctggtcgataatgaatgggtcgttgaactggatgacgcaatctggcgccgtaccaaattgggtatgtggctaaaagaagagcagaagccacgcattgcagcatggttagcggagaatgctaaaccactcactg

SEQ ID NO: 5131 - DNA, 690 bp, Photorhabdus luminescens
  misc_feature (407)..(407): n is a, c, g, or t
  misc_feature (688)..(688): n is a, c, g, or t
tgatgcgtgatattgcctggggatttttttatggcactgttgcgtttgatgatgtactgggcacgactaatcattacggtaacgtcgatttgtacatggggtcattccataaagaatggacccgtgctggccgtgattataaagagaatttcaaatctgacgagctgatggcgattttcaaagccatgatttctgactggaccaacaccgggtttgatcccttcgctgcaccgcaggaaacgggagtggcgtggggacgcaaaaatggcaatgaagatcgtttaatcgggcgtaaacgtgaagtggctaaacgcatggtgggcattccgggtgatgcgccgctgcgttcagatgataatggtcattccggtaaccgggctttcatggatgtaaatcaggagcagccngtcgtgaaagctgaaccaggctttgaaggtgaactgcatgcgttcaacctgtttggttatctctcccgttcggatatgacctggaatccgtcagtggtttccgtggtgcgtcagagtctgttttgcccgactcccgaagagtttattcttcctattgaccacggtaatgaccgtgccgaatggttcatccagttgtctgatgaaattgcctgggatatcaaggatggcaagagcagcagcccactgccgaaagtcatcatgcgtgccggggatattgctgnct

SEQ ID NO: 5132 - DNA, 766 bp, Photorhabdus luminescens
  misc_feature (766)..(766): n is a, c, g, or t
aagcttatctatatcgccatcatccaaaacatcatcactacattgtgtagagataaaattagccaccaccgatgatatcgttgacgattgacgcaaaaccttatttaataaaccaatggaaataatattagggggaattcccgtattcaattcctgacttttttcatattctccttgagaaacaacattagcatcctgactaacagaaaaagctttaaagtcatttttattactcatgagttctccttaaggaaaaaacttatgttttcattaaataaaactttgaattaatgaaaataaaaatatccacttgatcatcgtatataattttcagatcgcatttcaataatagcccttttttgataaggagtgatgaaatatttttataacttagagaaattaattattttcttatagttgatgccgttaatatatcaatgcctgaagccaaatttatacctaagctattcatttacattcagcatccgaaagtccctctatttgaactattccccaaaattcaggtaagcaaataaaataagctaccatattttaatctgagttttgtgatgcgcctctcataataaaaaaccgccagttccaataggattgatcagcttataaaaacattattgaggatttattagcttgaattattcagaataggtctattcttaatatgtggacaaattctattgtcaatacttattaaacctactaagtaagggaaaattatatgccatcaagaagagacgtcatagttggn

SEQ ID NO: 5133 - DNA, 692 bp, Photorhabdus luminescens
  misc_feature (620)..(620): n is a, c, g, or t
atgtaggtaagctgctagcttttttgaaagaacccgatcctccgaaaggttttcgtgatttactggataagctaccgaaatttaagcaagtccttaatatgccaactaaacggcttaatactgcgccttgtcaggaacatgtttcggttggtgacgatgtagatttaacccgtattcctatcatgcactgttggccagaggatgctgcgccattgattacttggggactgacagtaactcgtggcccgaataaagagcggcagaatcttggtatttatcgccagcaagtattaggtaaaaataagctcattatgcgctggctatctcatcgtggcggtgcgcttgattttcaggaatggtgtcaggcacatccaggagaacgtttcccagtggctgttgccttgggggctgatccagcgacaatattgggggctgtgacgccaattcctgatacattatcggaatatgcatttgccgggttattaagaggatataaaacagaagttgtgaaatgtctttcaaataaccttggaggtaccagcaagtgctgagatcgtattggaggggtatattgagcctggcgagttagctccagaagggccatatggtgaccatacggnctattataatgaaatcgatatgttcccggtgttaactgtgacacatattactcagcgccatgatgctatttt

SEQ ID NO: 5134 - DNA, 763 bp, Photorhabdus luminescens
aagcttacgtaaggcaactacaccacctaatataatttcagaagccttaccagtagatgaagattcaagactaacgctattaaaaacatcaccaacgacagatgcgataccaaagccattattaaatacagggattgaagatgcgttagaccagctaattcttgaacgtaaaaacattaataaactagaaaaaatcggattacaaccgacccgttcagctatctttgttggtcctcccggggtaggtaaaacattaacggcaagctggctagcccaaaaattaggcgtgcctttctatgtacttgacctaacagcagtaatgagtagttatttaggcaaaagtggtaataaccttagagcagccttagattttgccaaaagaggtccatgtgttttattactagatgaaatcgattcaatagctaaaaaaagaagtgacgattcggatgttggcgaacttaaacgtttagttacagtgattcttcaagaagtcgatcaatggccttcgtctagcgtgttacttgctgcgacaaactatgaagagcttatcgatcccgcattgtggagaagatttgaccttgtacttcattttgaaaaacctgatagcgaaacaatcaaagaagctatacaacgctttctaagttcagattatgcccattttgctcgatggatcgatattctttggaatcctgtttaaaaatgagtctttcagcaatattgaacgttcaattaacaaattttcgtcgttcaatagctttaggta

SEQ ID NO: 5135 - DNA, 818 bp, Photorhabdus luminescens
  misc_feature (565)..(565): n is a, c, g, or t
cctcaggcgtacactctctgctttcggctcgtatgacgtgtggaattgtgagcggataacaatttcacacaggaaacagctatgaccatgattacgccaagctatttaggtgacactatagaatactcaagcttacaaactcgcagatgcacatggcctgtacctgatgataagccctggcggctctaagcgctggtatctcaagtatcgtttcgaaggtaaggaaagccggattgcttttggcgcttatccgctgatctcactggcgaaagccagagaaaagcgcgatgaggtacggttgttgctagccgatggtatcaacccggcggaaaaacggggggagggaaaaaaagaggctcaggacgcgctgataacctttgagaaagtggcaagagactggcatcgaaatatcagccaaaaccgctggtcagaaacccatgccggacgggtatggcgcgatatggaacgcaatattttgccagcgataggtcatcgccacatagcggatctgaagactaaagacttgcttgagccgctgaaagccggggagcaaaaccgccatctngatttagcgtcacgactacgccagcgagtgaccgatattatgcgctatgcggtgcagaatgatttgatagagcgtaatcctgctcaggatctctccggggcgatagcgccgccgaaggcaacccatcggccggcggtgaaactggataagctaccggattttctggcaaggattgaaaactataaagggcggacattaaccaccctggccttaaagtttacactggtgcgttttatccgttccagtgaactac

SEQ ID NO: 5136 - DNA, 810 bp, Photorhabdus luminescens
  misc_feature (1)..(1): n is a, c, g, or t
  misc_feature (19)..(19): n is a, c, g, or t
ntcggtaggaactgtactntgggctcctctggatcacactgccggcatgcaagcttgttactggaagcgtattcttgggaatatcccaatggtaagttactggcaatggagatgaaacagcgcctacatgcaggtgaaatagtttcctttggccttgacgcatacagcatgatgcttgagcgtgttacccgttatctgattgaaattaatgatacgacccgtttagatctaatacgtcgatgtttttatttaaaagtttgtgaaaaactctctctaaatcaagatgataaaggctgcattggctggcgacgccaggttttgacccaactgatctatgagtggaagtgggatccagagcggttgaaaattttggataaccgcaacttatggaaaattgaacaggttcgtgatgcgcataatgaactgctcgataccatgatgcagagctatcgtaatcttatccgttttgccccgccgtattaatctgagtgtcagtgcccgtccccaggatattgttgtgctgacgcgtaaacttattgcttgatttgaagcatggcccaggaaaattaaccctgggtaatccccaaatcttcgccggacttttaaaaaaaaatttaaaatttttttagtttcctaaggggctgcaaacccgaacggtttggttttctacaaacaggccccggctttggaacaatattggggttaaaacctggaaataaacctatttcaaaaaatggtgcgggacacatttcacggctttaaaaaaaaaaggctttttctttttcttgggaaccactgggtagttccgga

SEQ ID NO: 5137 - DNA, 818 bp, Photorhabdus luminescens
  misc_feature (758)..(758): n is a, c, g, or t
  misc_feature (808)..(808): n is a, c, g, or t
acttcagggtacacaccttatgctttcggctcgtatgtctgtgtggaattgtgagcggataacaatttcacacaggaaacagctatgaccatgattacgccaagctatttaggtgacactatagaatactcaagctttgcgtgttgacagcaaatcagggcaagcggacagtaattgtattcgattaatgcccggcagaatctttacactaaccaaccacccgattgacgccatgaatgaccgctggcaagtcgtctcttcccaacacatagggtatgtccccgccgttttaggcgataacggaaccggcaccactctgaattcacacacccagttcattccaggccgcaacgattggcgtccgccataccgctataaaccattggccgacggcgatgaaattgcaacggttgtcgggcccggcactgaagaaatttacgttaataaagatggcgcggttcgcgttcactttcactggaaccgttatgatgcgcctgatgatcaggcttcttgctgggtacgggttgcacaagggtggaatggcaacggatttggttttctggcaacaccgcgagtgggtcaggaagtgattatctcctatctcaacggcgatattgaccggcctattattaccggatgtacttacaacggccttaaccgcccgccgctgaatttacccgcggaaaagacgcgcaccacgttcagaaccaaaacgcataaaggtaacggctttaacgaattatcgtttgaggacgcanacggcagtgaagaagtgtttattcatgctcaacgggatatgaatacgcangttctgaatg

SEQ ID NO: 5138 - DNA, 658 bp, Photorhabdus luminescens
  misc_feature (584)..(584): n is a, c, g, or t
tgcgcctgatggaaatggcagagcgttttaaactgccaattattactttcattgatactcctggtgcatatcctggggttggtgcagaagaacgtggtcaatctgaggcgatagctcgcaacttgcgtgaaatgtcccgcctgtctgtgcctgttatttgtactgtgattggtgaaggtggctctggtggtgcattggcgattggtgttggtgataaagtgaatatgctgcaatatagtacttattctgttatctccccagaaggttgtgcctcaattttgtggaaaagcgcggaaaaagcacctttggcggcagaagctatggggatcactgctcctcgtttgaaagagttggagttggtcgatactgtgatttcagagccattaggtggtgctcatcgtgactatgaagcaatatccacgtcgttgaaagctcagttgttgattgacctggcagagcttgatcatttgacatctgaagaattagtcaaccgccgatatcagcgcttgatgcaatatggttattgctgatatttgaattaattgtttggataagggatggtaactgactggaaatgataaatntcagtcacttccatcctttactgtttctgcttctttttatcatttcatattgttaatgaaagtagtgaacacct

SEQ ID NO: 5139 - DNA, 755 bp, Photorhabdus luminescens
attccttatctaaccgttcatacatgctcatagcagattccatccaactgtaatctattcagcaagtaaaccgccgttacctcttgaacattggttttttctgttatagtcacaacaacaatcatttaaacaactttttgatttttcttttctatttgataacgaacaggacgaccgagttttttcacttgtccctcatcaatagctcgttttaaccattccttcaattgagatttatgcagaccagtgttctcgataagggtatcaagtgtaatagggcttactgtcaatcgatggagctcagtaataaacaattgataaaaatccacagcctgcattacagttttttctgcttctgcttctgcttctgcttctgcttctgcttctgcttctgcttctgcttctgcttctgcttctgctgctgctgctgctgcttctgcttctgcttcgtgatcgattgaaccctggatttcatcttgttcgattgagtgagcaacaattattcgattttccgctacctctagatcaaattccgatgcaggtttcgcaaataattctgactgtgctggcatgaaaaatagatcaacctgttcagcttctttctgcgaagcagtagagttttctacggagaacaaatcagaaaccttaaggttgtgaacatctgcctcacacccatgccctccctttgcaactaaatcaatatttggcgcgcctactggaatccgtgggttttcccctaaaggccccacaactct

SEQ ID NO: 5140 - DNA, 698 bp, Photorhabdus luminescens
attcaccacaaggggcctgaaggtctaaataacttttcataattataatacactcactctttttattctctgctattcctgtagggacatgaatttaaaaacgttttcactttctcaagcaattgccacatatactgacagccatgatttcgtgtcaccgtttcatgtaaggattgccacagacgctcaattttattcagccagggtgaataaacaggtaaaaacaacagattaaatttaggatgacaagccagccaatctctgacccgtcggcttttatggatactgtaattatccaaaatcaaagtgagggtttcagcatgacaatactggcgttcaagttcttccaatacattgataaataactgagaattcttatttaacccgtcagcataagtcacttttcccgtttgaacattcaggcaacctgcaaaataatgtttttggttttttcctggtgtcactatacgtttctgttgcccttttaaataccagtcagccccgatttttggattcagctcgatgtcgacttcatcttcataaaaaacgggatgtttttctgaacacgttgacaatgcctcggtaattttcgccattttttcatggtactcgggatcgggtaatttaagcgtcggggctgcccttcgccacacgatacccattttatgtaagtaacgatagaaggtactgatggatat

SEQ ID NO: 5141 - DNA, 761 bp, Photorhabdus luminescens
  misc_feature (721)..(721): n is a, c, g, or t
  misc_feature (749)..(749): n is a, c, g, or t
tgccgtcaagattatcttaactatctgagagtcagagagtggcaggatatatatacccagttacgacaagttgtgaaagaaattggtctgtcggtaaatagtcaggaggcagattaccgaggtattcatactgcgttactttctgggctgttatctcatatcggccaaaaagataccgataaacaggaatatactggtgcgcgtaatgcccgttttgctatttttcctggttctggcttattcaagaaaccacctaagtggtcaatggcagcggaattggttgaaactagtcgcttgtggggacgtattgctgcgcgaatagaacctgaatgggttgaaccgttagccgggcatctggtgaagtatcattatagcgagccgcactggcaaaaatctcagggtgcgataatggctagggaaaaagtcactttatatggtttgccaattgtggctagtcgtctggttaattacagcaaaattgatccaatgctctgccgtgagttgtttatccgccatgcgctggtggaaggcgactggcaaactcgacatgcatttttccgagcgaatctgaaattacgtgaggaaattgaggagctagaacataaatcccgtcgtcgtgacattttggtggatgatgaaaccttgtttagtttctatgatcaacggctacctcaggatgtggtttctgctcgccattttgatcgctggtggatgaagacanggtaagagcaaccggacttgcttaattntgaaaaaatatg

SEQ ID NO: 5142 - DNA, 691 bp, Photorhabdus luminescens
  misc_feature (691)..(691): n is a, c, g, or t
atatgcgcaacatactgccccatgctgcccattttcgtgtactggcaattgatatgctgggacatggcttcacggataaacctgtccgttcctatgagattatcgattatgtggaacacctacgggatcttattgaaacattaaatctgaagaaaattcacctttctggcgagtcgctaggcggatgggttgcagcccggtttgcggcaaaatatccgcaatatattcaccgtctggtgttgaacaccgccggtggcatgattgctgatccaaatgtgatggaacgcctgcgcacactgagcttaaatgcagtgaaaaaccccgatcgggaagctacccgcaaacgtcttgaattcctaatggaagatcctgcaatggtgacagaagacttggttgaaacccgttttgccatttatcgtcagccgggtatgttgtccgcaatggaaaacatcatgtgcctgcaagatatggatacccgtttacgtaaccttttgaccaaagatgaactggcaaagatccaggctgaaaccttagtgctatggaccacacacgatccgactgctgcggtttcagtaggccagcgtcttgccgggcttatcaaaaatagccgttttgtcgtgatggaaaaatgcggtcactggcctcaatatgaagacccggacacatttaaccggcttcatatcgatttttn

SEQ ID NO: 5143 - DNA, 757 bp, Photorhabdus luminescens
  misc_feature (757)..(757): n is a, c, g, or t
ctattcattttatttatcttaataagtaaatcgtgaataggagaaaatctgatttttctgtttgagaaaatcagtcgaaagttcagttggcaataggtttaatgtaataatctcagacaccgctaaagcgattttatatcctataccacagaatccagccgcaacaaaacatctcttttcttcatcgataaagtcaagaatagggcgttcatctggtgtatatgaatcatatcctttaatgatagagagaatattgcttggctcatgtttaaattttgattttaggagcctttcgctgatatcgttttcaataatattatcattatattctatatcttctggtgtctcggccacatttctaatcttagatccggcttgatagaaatattcagcaagtggcacgatatgcgtgccagtttcggtatctataattggcatatttgtactgtaggaggtacggatatttgccagagggatacttttagcattaacgggcagtttatatgccagtgtttttgtccatgcaccgatggctaaaacaatatagtctgcttcaatggttgagtgagcaagttgaacgatggctttaccattttcggttgttattgcatgtactttggtattctctaatactagattccccgtatctctaacaacttgtgctaagtttgaggctgtatgtctaatatagccaaatccgccattgggctcaaaaaggataattcggttgttatgcttggataacatccattggttn

SEQ ID NO: 5144 - DNA, 687 bp, Photorhabdus luminescens
  misc_feature (681)..(681): n is a, c, g, or t
ctcgcgataggatgaggagcagtcaccaagattaaacttattaccaacaaataagtgacccactgtcgccaagaaatagcgaccacaacgacgcccaaggtgataatcccgactcagcgctggcaaacggctgcctaatgcactggcagttaatggtgcaggcggataaatttcaaaaatctgcacatcatcaggtggattttcaataaatttctgggtgtggtggtagcttttcgcatgttgttgtagcatccgtaccatcttttgcagaccactatctcccaaccaacgttccattcgttgcatccaatcaggcgtgtaatagagctgtgaagggaccgtacggatcaccacgatggtatctgcaccacgccgatacgcctcttctactggaatcgcatcactgatgccaccatcataataaacaacatcattgatcgtcacaccattgcgataaaacccaggaatggcacttgatgccttaatcacttccagccaattattctcatcaggctggaaataggtaggttcaaaattatctgaacgacatgcgcacatgtaaaactcacatccagcctcaaatttgcgtaaagctgtcgggatatccaatggcagttcctgtgaagcggcctgcacaaaccaatctaaatcaactaaatgaccaccacgtacaaaacgcanagggtt

SEQ ID NO: 5145 - DNA, 702 bp, Photorhabdus luminescens
tttatctcggtgacacggaacaggcattgcatgcgccgaaaaatttctttcagcaggcaaaagctgacgccaagccgtatcagataccggcaactgacatcagttgtgatacaaaacggattgtcgcggtgactgcttgtcctacaggggtagcgcacacctttatggccgctgaggccatcgaaaccgaagccaaaaagcgcggttggtgggtcaaggtggaaacgcgtggttcagtaggtgcgggtaatgtgattacgccggaagaggtagaaaaagcggatctggtgctagtcgttgccgatattgacgtagatctggcgaaatttgccggaaaaccgatgtaccgtacctctaccgggctggcgttgaagaaaacagcgcaagaatttgataaggcgctagccgaagccaagcttttcgagccggaagggcaaaaggttaaaactgaccggagggaagataataccggtatctatcgtcacttgttgacgggtgtttcttacatgttaccgatggtggtggcgggtggcctgtgcattgcattgtcatttgcttttggcatcactgcatttaaagaatcgggtacattggcggcggcgttaatgcaaaatcgtggtagctcagcttttgcgctgatggtccctgtactgacaggttacattgctttctcgatcgctgatcggccaggtctgacacccg

SEQ ID NO: 5146 - DNA, 770 bp, Photorhabdus luminescens
tacagactgtataacctgcaagaatttgagtgccgccaccaacaaacccgatctgttttaatataagattagtataacttgatttctctttttccctttcaattattgcatattgctttactctgtttgctgtcaaacagaaagcttgttcttttaagtgatctatttcaaactgaataatctcaattgcaccatttgaagataaacagtgaatacgaacctgacctaatatatcctctacaaaaagatttatttttgaattaaaatccattcttattttactatgagttagatagcgaaaagataaagttttcgctaactctcttaattcccttacctttaaatccagtaggttatcttgcttcatatctccccttataaaaccgatttcttattttcaaatcacaaaaccattaacataacttatgtaacataacaaaaaaaaaccaataaagaaacaatgaacagagctatatagataaatccactcgaataacgagtggattttcacataaatagatagattaaaattattaaatcaagatacgtagcatacgacgcagaggctctgctgctcccacagcaattggtcaccgacagtaaaagcagataaatactctggtcccatattcagcttacgtaaacgccctacaggagtatcccaagttccccgtacccgcgcccgagttaattcacgcatactcaattcgcgatcatttggaatacaccaacccacgcgttatgccagccagtaattgctcatttcagga

SEQ ID NO: 5147 - DNA, 707 bp, Photorhabdus luminescens
  misc_feature (560)..(560): n is a, c, g, or t
  misc_feature (639)..(639): n is a, c, g, or t
ccttattttcagtgggttaacacaatgataagtaatgtaaaaaattcgatacgcggaacatatcattcgattagcaaaaagtatttacctcgttatcttgccgaattctgtttcaagttcaattggcgctttaaccttaaaaaaacattcgaacagcttatttattcatgtatccgggcagcacctatacctgagtatttactcaagctagctgagattcgatggtaatcaggtaaaagaatgctcaccagatggaaatccaaaataactaaacagccttctgcatccatatgggctctaaaaatggttctcaccttcctaccccttgtatgcaaccgccttcaaactctacctctcaatgagccgtagccgtaacagaagcgattacacatgaagtgtgcctaaatgatttggcagtatcagacccctgaccagaaaacatgcctagatgaacgtaatgttccggtgaactcaccttgcgtggtcagataaccaccaaatgggatgttaacggaagggattctcaggccagggcaacagctcattcaaccgattgttcngccagacaggcagccggctgaggacatcacgtaaccagacccagggctcatgtccgttggctttggcccgttccagcangctcattatcatggcccgccgttgccccgcggccagtgaacccgcaaaagccagttctttcggccgag

SEQ ID NO: 5148 - DNA, 767 bp, Photorhabdus luminescens
  misc_feature (509)..(509): n is a, c, g, or t
ttacgccgtcgtgcgctcattccacgcatcagcatgaatgatgttgccgtctttgtaggtccaggtgattttttcgtaacgcaactcaatgcgttccagatggttgtgcttctctttggtagggtctttgatgtcatgcatcagcggtgccactttcaccaccttcacgttgtccagttgggtgatgaagtactctttctcctgacctgcgtcgtcaatgttgtaccatttgatttcagcagatttcagggtctggccggtggtgaccgctttatacaaatagggacttgatgcatccacctctttggtgaataccaatggggcatgcacacgggtccccgtcagtttgccggtattgttgtccgtcgggatgtgcaacatatgttccaacgccacaatttcaatactaccttcccggccccgtacctcgacagagcccttgatgtcagcaccgccgtcatctttcagccataaataagcgggaatcgccataatgattactcctaatngttacttaagtgatgtcgccggtagcggcgacgttgttgataaggtgtccggtactttctgcggtcgcgcacaggcggccacatgcggtatcagacggatttcaaccctgccattggcagctcgccccgcagcggttgtgttagacgcatcggactcgttgctccttgcctcgacagtgaatcagccggtgatttgcactggttgaacttcaatccgtactgtacgtccgtgcctcgcactcctgacttcctgcccaa

SEQ ID NO: 5149 - DNA, 710 bp, Photorhabdus luminescens
  misc_feature (458)..(458): n is a, c, g, or t
  misc_feature (494)..(494): n is a, c, g, or t
  misc_feature (631)..(631): n is a, c, g, or t
  misc_feature (647)..(647): n is a, c, g, or t
  misc_feature (710)..(710): n is a, c, g, or t
accgtattgccaagcaggaaatggagagtgaatctcagcgtctgcgtggtctgcggttgcgtctgtggcaggggatcaaagatattgaagaggtcttccttaacggggatttagagcacggtgcgccgcatattctgaatgtcagcttcaactatgttgaaggtgaatcactgatgatgtcattaaaagatctggcggtttcttcgggttctgcatgtacttctgccagcttggagccttcctacgtattgcgtgcgttgggaatgaatgacgaactggctcacagctctatccgtttctctttagggcgctttacgacagaagaagagatcgactacgccattgaattgattcacaaatctattggccgcctgcgtgaactttctccgctgtgggaaatgtttagacaaggtgtggatctaaatagtatcgaatggtctcatcattaatcagacggnttcaggagtaataacatggcttacagcgaaaaagtnattgatcactatgaaaatccacgtaacgtcggttctttcgatagtgaagatccaatggttggcagcggcatggttggtgcccctgcgtgtggtgatgtgatgaaactgcaaatcaaagtcaatactgaaggcatttntgaagatgcgccgttnaaaacttacagttgcagttctgcgattgcttacagctctttagttactgaacggatgaacggn

SEQ ID NO: 5150 - DNA, 782 bp, Photorhabdus luminescens
  misc_feature (413)..(413): n is a, c, g, or t
  misc_feature (523)..(523): n is a, c, g, or t
aagcttgtggtgagcatattcgtactgttattacccgcatgttagaagttgccttattggtggggggaatgatggctgccaacgccattctgccgggcatgggatttatggtggtggcggggatttatctactcaaccgtacggctaaacgtcctttggttgaaatggcgattgggccgattgcaacgattgtagttggggtgctagctaacgttatttatctgttctccccctttattttgtgatgataaaaatagagggggggaagtgagggagaacaggagaacagatagtgaacacatatccattacctagtctgagcatggagcaggcgcagcacaaacagtttcatttagttgacattatttgccgccattttcccggtgctgatttcctcaccaccggagatttanggctggtgccgggattgaaccggccacagataacgcaacgtgttgaacaggtcattgccgatttcttttctgctgaggctgctgtgttagtacaaggggcgggaaccggngcaatacgttgtgggctatcggcattacttaatgcgggtgatcgcttgctggttcatgatgcgccgttatatccctcgacggcgattattgtcgagcagatgggcttgcatctggtgcgggccgatttcaatcaatccgaacaaatacgagctgcgatttcgcaacatttaccggtggcggggttgtgacacccaagctgcatatatcgatgatgctcatgagcttggcaacgtatatcactgctgaatgctgcatcat

SEQ ID NO: 5151 - DNA, 703 bp, Photorhabdus luminescens
  misc_feature (668)..(668): n is a, c, g, or t
ttgtgtaaccgccaatgtatcgctattaccaaccacatttgtaagctggacaacacctttttgtgttaatgaagcactgggaatatctgttgtcattttttgctctagcgctttatttaattgagcggtgagtttggctatgtttccatcatccagaacatcattgccagatcgtgtcgcgataaaatcagtcacggcagatgataccgctgacgcttgacgtaataccttatttaataagtgggtgggaacattatctggtgaaaatccagtttgtaaactctgatttacctcgtatttgtcttgactgattacattcgcattatcactagtagaaaaagccttaaaatcattcttataactcatatactttctcctgcaattaaataatattattttacaaccaatatattgaattattgtaaaaacaatctctcttgcaattcacgccaatcaagtctagttcagaaaaagaataatgcagcgttcttattacttataaggttaattatttttatataattggtagtaataaatagttcaacattagaaacgacagccggaaatttatctattaatacccattacgtatcactattgacattttaattaaattacccagatatacgtctcactgccaacccagtaatttccctgttttttctctnttttctgcagatgcgttgactggatttactatgtt

SEQ ID NO: 5152 - DNA, 761 bp, Photorhabdus luminescens
tattatctgatgttgatattgagagtacggtttatgatggtactaatccgaatccgacgacaattaacgttgaggaaggtttggatattctgcgtcagcataatagcgattgcgttatttctttagggggtggttcgccacatgattgtgcaaaagctattgtgttggtcgctgctaatggaggcgatatccgggattatgtcggtattggccgttcatctaaaccgcatttgccattaatctcagtcaatactaccgcgggtactgcgtcagaaatgtcacgtttctgtgttattaccgatactgaaagccatattaaaatggccattgctgacaagaaaataacacctgttttgtctgtgaacgatccggaattaatggtaggaatgccgaaagggttaaccgccgcaactggaatggatgcaatgactcatgcggttgaagcctatgtttctcctgcggctagcccaataacggatgcttgtgcattgaaagcaatctcaatgattagtcactctttacgccaagcagttgcagatgggagcaatatagaagcacgtgaaaacatggcctatgcacaattcttggcggggatggcgtttaatagtgcattactggggtatgtacacgccatgtctcaccaattgggcggtacttatgatctaccacacggcatatgcaatgctgttttattaccacacgttcaagagttcaacgctaaagcggttgcgggtcgtttgacagatattgccgttgccatg

SEQ ID NO: 5153 - DNA, 689 bp, Photorhabdus luminescens
  misc_feature (632)..(632): n is a, c, g, or t
  misc_feature (661)..(661): n is a, c, g, or t
  misc_feature (689)..(689): n is a, c, g, or t
aaactcgatgttttccaaacccagtgttttcgccgaatcgcgagcacaatcaatggcttctgagctgatttcaatgccggttaaacaggtatttttatctgcgcaatgcagaccaaagcccccaacaccgcagaatagatcccacatgctactgattttcagttcacgaacccaacgccctgctgttgcatacaattcagaagccattttcgggttagtctggaaaaagctatgtggacgaatgtaaaggggaatgccattgaactgctctttaaacgccttttgttcagtaaacagaatctctttttccccctccaaaatcgccatatggattggctgaatattggcagagatcacccgtagctgtggcaattgctcatgcaaccggggtaaagcacgcttcagttgagcaatttttgtttcagaacgcaatacaaaacgtaacatcatttcaccgctatgaccgctttctgtcagcaacaaatatttcagttcacctcgtttacgagcaacgttatacggtgtcaacccgcacacgcaatgaacgatttaacaaccatcaatacaggctgaaaatgcgctggatagaggggacaatgacacagatcaaccgccgtgccatcacgatgcancatgcctagcaatgggcgttctacactgncactgacgaccattttagctttattacn

SEQ ID NO: 5154 - DNA, 762 bp, Photorhabdus luminescens
  misc_feature (730)..(730): n is a, c, g, or t
aagcttcctttttcgccccaatgttcgcacattgggattgataaatagcttgtttccctctttcaataaattaaattttgcattttcaaatatagcggaatttttctgctctaccttgacatcattccccaacgatttcagattaatgcctgaaatccgcggcactcttctgacacgctcacctgaactgttcgacgttggtatcaccctatcgtcagattgtcctttggcaaactttgaagtcgttaaaacgccggtattttccacgcgaatactggcatttatctgtagacgatcaaccgcttgtttagcatcatccaacgcttgtagctcttcttcggtcaatcctttgtagaattttttttcagcttccggtattaattcgggatcaatatagctaccggtttcccccgcgcctgtcgattcatagccattaccagacaaaccactaccaccggcaccggtacgatcaggttttgaatcgctctgttttgcccctctaacatcttcttgtacctgggcaattttattttcagccgcagcaatatcacgtttaccccgatattccgccccctgataggcgatatttgcatcattttccgccttttcggcccgttgttgttgcaataatgcttcttcttttcttaattctgcttttttctgagccgctgcatatcttgttttgcactggcatgatgctgttcactttgtgctacgccgacctcggatntcttcaccgcttcttttacgtgttggtggtat

SEQ ID NO: 5155 - DNA, 684 bp, Photorhabdus luminescens
  misc_feature (514)..(514): n is a, c, g, or t
  misc_feature (516)..(516): n is a, c, g, or t
tactgtccgcgggaagctggatgttcaaaataaccgctgtattcgtcaggtacagtggttttttgtttgatcaatttgtttgatcaaatagcactgagcgcaggcccttccttcagataggggataagtagttatcggagtgtgtaaacttgacgttaaacactccgaattttttgacattaagtggatgtcccgccgtaaccgaatagcggctggcgtagccagagggcggggagataccctcttgtatgatttaaagggatttttgatgggaaaagcatctaatagaagtgcagtgtacctctttacaggaagatattacgacgataatggcggtaatcgtattactgctgttggggctggtggtgaagtttatgcttatggcggaaatgatgatgttaccgttggttcatttaaagtcgatgtataccatacagatggcgaccttacggtaaagggagtgtcaggttataccggtattcataaaacgggaaatggcgggctgtcatttacngnggctgccggtgtagctgctattgatcacacgggtgaaacgggaaatttaaattattcgggtgcggccggttataataaactggtccgtaaagggttgtctggtgatactcgttttagaggggccggtggatacaatcagttatggcatgagactaaaccgggaaattt

SEQ ID NO: 5156 - DNA, 767 bp, Photorhabdus luminescens
  misc_feature (545)..(545): n is a, c, g, or t
  misc_feature (671)..(671): n is a, c, g, or t
  misc_feature (687)..(687): n is a, c, g, or t
  misc_feature (713)..(713): n is a, c, g, or t
tttaagcgcgaccgccaaatcatcgcgttgctgatccgttaattcattcattcgacgcacatgaactttaggtaacaacatggtttcatagggccatgctgcccaataaggcacaaccgccaaccaatgggttgtatcgaccacaacccgctcaccatcagctaattcagcctgaatataatccatcaataaattagaactctgttcttggtaataagcacgcagttgtttatctttacgttcaatttcgtttggcagaaaactattcgcccagatttgcccatgtggatgaggctgagaacatcccattgcttcacccttattttcaaaaacttgaacccaaagatattccttacccagtatttcaatgtgctcattccaggtatcaatcaattgacgaatgtgtttaaccggcaattccggcaatgtcttactgtgatcgggagaaaaacagatcacgcgacttaatcctctaaccccctgcgctttaaatagtggatgacatgatggtggtaaatcaggtgaatcgagcattaaagccgaanaatcattattaaaaacaaaggctccttgataagcaggatttttatcaccggaaatacgtgtatttgatgggcaaagaaacattgctcatcatagttcggaatattgtctatcaatggctgctcatnctgcccatgccacggncgtttcacccgatgaggagagaccanaacccattgcccggttaacggattataacgacgatggggatgttcaataggata

SEQ ID NO: 5157 - DNA, 680 bp, Photorhabdus luminescens
aaggcattattctccaccgcattcttcccggcttgggccccggtaacggcgctttcggtggagtcaccggcaatgccgccggccagcccggccgccaaagtagaaagagtgctgatggtctgtttttcctcttcacttaagtcgctgactttagcattttcgccgtgaatatgcttcatcagttcccgggcagccagttcaccgcccgccgcgcctgccgcacccgccagcgcattgttgccactgacttcggcggctactgcccccagaatggcatgggccagagtattggtgacgatatcgacttcatgggttttcgggtcggtagtcaggtctttaatcaccccggccagataaggagaagcgccgcctgccagtgcctgaccgatatttccgcccgcgagtccctgaatggccgcggtagccgcctgtaaagcagtgtggtatttcccaccggtgcccagaccagactcattcaatgccgcgttataggcggtcttgtaaatctggtctttaataagcgccggggtgatagggcggttaacgcgtaccttcaacactttatgggcgctttatatccgggcactgatgtctccaatttggcgttgctgctttggtggcaatatgccccttcgtgccggcaattaatcacctgccactgattcgcaatagttgggccg

SEQ ID NO: 5158 - DNA, 772 bp, Photorhabdus luminescens
  misc_feature (589)..(589): n is a, c, g, or t
aagcttagtgaggatcaagaaaaagattatatccggattgcgacccgctctcgcttcggggtgatgcgtgtcgacgataaccgcacagaagagcaaaagcagtatgatgaagcatggcgaaaactttatcagcccagttcccaacactataaaaatccgatcccactggccccgctgctgcccggttcgcctcctgatgatgaagctttacccgctcctcccgcagagggtatgccggggactattccgcagccgttgacaaaaaaactcccgctggtcagtacttctccctggtcttttttacccagctatgaagactgggttatcctcgggcaggaggtggctggcctaacagaacaagggttggattatatccgcgacagtacccgcgaactccttgctcaatttggagcatggttaaatcaagctgggaagtgggtgtgtgaagagattattgacccgataagccatcaggccagctatgcgttttcctgggtcagtgcacaaacgggaaaaatcgtgacctggacggagagtgagataaaagcccggtggcagactgtgcaacagggttcggacatcaccctgnaagagctaaaaaacattagctggatgcagatattaaaagaggtgggtgaaggaatgctggaaatggtagtgattattgccggtgttgccattgttatccttgtcacccttgccgtcgctgccgcgctgattgcactggtggaaattttagccgctgctgctgcggtaagcgccgctgcattgg

SEQ ID NO: 5159 - DNA, 694 bp, Photorhabdus luminescens
  misc_feature (609)..(609): n is a, c, g, or t
tacgccatgttttcgcacaagcagatcaaaaagcagatttagtcatcagcagtggtggcgtttctgtaggtgaagcagactacactaagcagatactggatgaattaggcgaaatcagtttctggaaactggcaatgaaaccgggtaaacctttcgcttttggcaaactaaaaaacgcctggttctgcggtttgcccggtaatccagtttcagccgttctcactttctatcaattagttcaacctttaatcgcgcgtctatccggttttacggcatggcaaccccctatgcgtatgcgcgccaaggtcaccacgccattgaaaaagagaccgggaagaatggattttcaacggggcattacttcggtgaatgaacaaggtgaactagaagttcgtacaacaggacatcaaggctctcatatatttagttcattcagtcaggggaactgcttcattgttctggaacgtgaacgtggacaggtagaagttggtgaaaatgttgaaatcgaattgttcaatcacttactgaaaaatgaataatgaccattgaactaacagatgcagaaaccctacgctataaccgccagattgttctacgcgggttcgattntgacggtcaggaaaaattgaaatcttcggcgatcctgatagttggtgccggtggtttaggttgcgcagcatcccagtatttgacc

SEQ ID NO: 5160 - DNA, 773 bp, Photorhabdus luminescens
  misc_feature (663)..(663): n is a, c, g, or t
  misc_feature (695)..(695): n is a, c, g, or t
  misc_feature (755)..(755): n is a, c, g, or t
  misc_feature (773)..(773): n is a, c, g, or t
aagcttaaagctgatgttgcttttgaatttttctacaaactcaatattcctttttattgtttccacgatattgatgttgcccccgaaggttgttccttaaaagaatatatttataatttgggtgtcatgtccgatattcttgcagataaacaagcagaaactggcgttaaattattatggggaacggcaaactgttttacacatcctcgttatgctgccggtgcgtcaacgaatccagatctcaatattttcgcttatgcatcagcacaagtatgtcaagttatgcaaatgactaaaaagctaggtggtgaaaattatgtactgtggggcggacgtgaaggctatgaaagtttgctcaatacagatttacgtcaagaaagagaacaaatcggccgttttatgcaaatggttgtggattataaatacaaaattggttttcagggaacattgctaattgaacctaaacctcaggaaccgactaaacaccaatatgattatgatgtagcgactgtttatggtttcctaaagcagtttggtttagaaaatgaaattaaggtgaatattgaagctaaccatgccacattagctggacactcatttcaacatgaagttgccaccgcgattgcattgggaatattgggctctattgatgcgaatcgcggngatgctcaattgggttgggataccgatcaatntccaaatagtgtcgaagagaattctcttgtaatgtatgaaatcttaaaagctggtggctntaccacgggtggtctaan

SEQ ID NO: 5161 - DNA, 696 bp, Photorhabdus luminescens
cccctgttttctcatcttccagtgcttgaatatagtcactaatagttgctgccggtggttctggctgccagttaggttcctgatatccgcgttgcaaatcgcgtaggattaatgtcaaacttttaccatcagcaaccagtagatcgatagtcaaatgtaataagtgcgtccggtcatcagtacgatatagcgtcaaatcaaacagcggccagttatcgctaggaacacctttagtgcgcaggatatcgcgggcatccgcgagttttgtctcgcgttgagcaggcatcatgttacgacagtcaattaccgtcggggtatagcaaggcacttccggcagaatatgatattgcccatccttcacataaccacgtaattgcgcatgatgactcaccacacggttccaggcagtaatgaagcgaggcagatcaagatcgttgatagccagttcagcgtagaaatgcgcgataccgttaccaaactgaaacagttggctttcgcctaaccaataagcatattgcaacgcagtcagtggcagcgtttgctccgatgctggcttggtctcaattggaacagcctgtgtagcgagtgttgtttcaactgtttcaattgtccgcaaagtacggcaaaactcactcaacttcggatgttcaaaaagctgttgcagatttgcctgttcgtaaccttgacgacgcaatt

SEQ ID NO: 5162 - DNA, 775 bp, Photorhabdus luminescens
  misc_feature (8)..(8): n is a, c, g, or t
  misc_feature (21)..(21): n is a, c, g, or t
  misc_feature (42)..(42): n is a, c, g, or t
  misc_feature (51)..(51): n is a, c, g, or t
  misc_feature (62)..(64): n is a, c, g, or t
  misc_feature (86)..(87): n is a, c, g, or t
  misc_feature (89)..(90): n is a, c, g, or t
  misc_feature (94)..(96): n is a, c, g, or t
  misc_feature (102)..(102): n is a, c, g, or t
  misc_feature (110)..(110): n is a, c, g, or t
  misc_feature (114)..(114): n is a, c, g, or t
  misc_feature (119)..(119): n is a, c, g, or t
  misc_feature (138)..(138): n is a, c, g, or t
  misc_feature (140)..(142): n is a, c, g, or t
  misc_feature (147)..(147): n is a, c, g, or t
  misc_feature (149)..(149): n is a, c, g, or t
  misc_feature (158)..(158): n is a, c, g, or t
  misc_feature (163)..(163): n is a, c, g, or t
  misc_feature (167)..(167): n is a, c, g, or t
  misc_feature (170)..(170): n is a, c, g, or t
  misc_feature (172)..(172): n is a, c, g, or t
  misc_feature (174)..(174): n is a, c, g, or t
  misc_feature (176)..(177): n is a, c, g, or t
  misc_feature (181)..(181): n is a, c, g, or t
  misc_feature (189)..(190): n is a, c, g, or t
  misc_feature (200)..(200): n is a, c, g, or t
  misc_feature (202)..(202): n is a, c, g, or t
  misc_feature (204)..(204): n is a, c, g, or t
  misc_feature (209)..(210): n is a, c, g, or t
  misc_feature (213)..(213): n is a, c, g, or t
  misc_feature (229)..(229): n is a, c, g, or t
  misc_feature (242)..(242): n is a, c, g, or t
  misc_feature (244)..(244): n is a, c, g, or t
  misc_feature (254)..(254): n is a, c, g, or t
  misc_feature (264)..(264): n is a, c, g, or t
  misc_feature (267)..(267): n is a, c, g, or t
  misc_feature (270)..(271): n is a, c, g, or t
  misc_feature (274)..(274): n is a, c, g, or t
  misc_feature (276)..(276): n is a, c, g, or t
  misc_feature (288)..(288): n is a, c, g, or t
  misc_feature (291)..(291): n is a, c, g, or t
  misc_feature (308)..(308): n is a, c, g, or t
  misc_feature (310)..(310): n is a, c, g, or t
  misc_feature (314)..(314): n is a, c, g, or t
  misc_feature (316)..(316): n is a, c, g, or t
  misc_feature (333)..(333): n is a, c, g, or t
  misc_feature (337)..(337): n is a, c, g, or t
  misc_feature (339)..(339): n is a, c, g, or t
  misc_feature (349)..(350): n is a, c, g, or t
  misc_feature (360)..(360): n is a, c, g, or t
  misc_feature (366)..(366): n is a, c, g, or t
  misc_feature (375)..(375): n is a, c, g, or t
  misc_feature (402)..(403): n is a, c, g, or t
  misc_feature (409)..(409): n is a, c, g, or t
  misc_feature (412)..(413): n is a, c, g, or t
  misc_feature (418)..(419): n is a, c, g, or t
  misc_feature (424)..(425): n is a, c, g, or t
  misc_feature (436)..(436): n is a, c, g, or t
  misc_feature (447)..(447): n is a, c, g, or t
  misc_feature (454)..(455): n is a, c, g, or t
  misc_feature (457)..(458): n is a, c, g, or t
  misc_feature (467)..(467): n is a, c, g, or t
  misc_feature (507)..(507): n is a, c, g, or t
  misc_feature (509)..(509): n is a, c, g, or t
  misc_feature (515)..(515): n is a, c, g, or t
  misc_feature (540)..(540): n is a, c, g, or t
  misc_feature (559)..(559): n is a, c, g, or t
  misc_feature (575)..(575): n is a, c, g, or t
  misc_feature (582)..(582): n is a, c, g, or t
  misc_feature (595)..(595): n is a, c, g, or t
  misc_feature (599)..(599): n is a, c, g, or t
  misc_feature (601)..(601): n is a, c, g, or t
  misc_feature (617)..(617): n is a, c, g, or t
  misc_feature (633)..(633): n is a, c, g, or t
  misc_feature (643)..(644): n is a, c, g, or t
  misc_feature (647)..(647): n is a, c, g, or t
  misc_feature (655)..(655): n is a, c, g, or t
  misc_feature (673)..(673): n is a, c, g, or t
  misc_feature (678)..(678): n is a, c, g, or t
  misc_feature (686)..(687): n is a, c, g, or t
  misc_feature (697)..(697): n is a, c, g, or t
  misc_feature (700)..(700): n is a, c, g, or t
  misc_feature (703)..(703): n is a, c, g, or t
  misc_feature (712)..(712): n is a, c, g, or t
  misc_feature (717)..(717): n is a, c, g, or t
  misc_feature (741)..(741): n is a, c, g, or t
  misc_feature (746)..(746): n is a, c, g, or t
  misc_feature (750)..(750): n is a, c, g, or t
  misc_feature (762)..(762): n is a, c, g, or t
  misc_feature (765)..(766): n is a, c, g, or t
  misc_feature (768)..(768): n is a, c, g, or t
aagcttgnacaacagaataantttttatttggtatgagttgnggtaacaantgtaagaaaannnaaggtaaaataaaaggttattnngnntatnnngatatnaatgattnggtnaaagnttatatgagaaatatgaanannnataangnttatgaatnattgngtgnttnangngnnaagnagagaagnnttgaggaatnantnaatannagnaaattgattgataatnttgaaggatattnanaattgggttngaattaaaanaantanntgnanaaagtatttaanagnaataaagggtttattantnaggngnagaagttagttaaaaangatnangaataagagnntgagtaagtnattagnatgaatatnttgtgtttgaatatttgtgttaagtannaaaatnatnngttannataannaattatggaanggatgattttnttatgtnnannggtttattnttttaattgatagaatgtttaggttaaatattataatatnanttaatnttatattgagataaaatgatttaanagagtttaatatgaatttntttttttttgagtttnttggttnttttggtggtttntttntnttgtattggatggtanaaaaaaatgggaaaanaaaaaattanntgntgataatngaaagttatttgtttgtnttttnttttaatnngtttttaaanagnatnttatttggntatangttatttatttattttttaaaaangtagnaagnaaatttttattnaanngnattaagt

SEQ ID NO: 5163 - DNA, 700 bp, Photorhabdus luminescens
  misc_feature (697)..(697): n is a, c, g, or t
tggccggatcaaccatttgggtggatttctgcaaatcggtacgggtggtgtagaccagtacataaatttgttgttgccccagtgctggtgttagctttagtgtgccttccagccgatcggtggacataacccccggacgttcatagggaaaataactgctcgggtaaaatgcggcggggcgtaacccttgatccaggactaaaacatttggcacgtaaacttgtttatcttgtactaagctgctcagggtaatatccaaagagccccggtttgccggcagcgcgaatgcggctatcggcccctgaatctctccctcattaagatgctgagatgctgcattgaggataatggtttgagtatcactggtattaatcggttgccagctcagtttttgcaatgctgttatcgagagggacggggcgacaatatcctgttttgtgggtgttttagctgtgatagttgcttgagttgcggtaatgggcgttgcatatcctataagaggaaatgtgctacagagtaccgcgctaaggcaccatgagagccagtttagttttcatctcttacccttgttcggttgaaaaaagagactgatgcccacggtcaagaggcatatcagtctatacccgttatctttcaagttgcctctgtgttggctgcactcactcaccccggtcacatagtttgctattgatccggngat

SEQ ID NO: 5164 - DNA, 795 bp, Photorhabdus luminescens
  misc_feature (228)..(229): n is a, c, g, or t
aagcttattcaacttcgttacgtgtgactatgacggaaattcttgatcgtcacccatcccccggtcgtgatcgcagtgaggatctttattttggtgtgctaagtttccccgtagagagccacattatttactaccgggaagttccgacgggtattgaagtgttggcggtgttgcatcaaacgcaagatccacataatcatctataccctatggatttcaagatgcatnncgacggttagggagcttatccctggcagcatatagaacgatgtgaccggtgtgagcgagttgctccattcaatatgttctctgtcccacgaccgttctatcctgactaccatacatcttgcgttactttatttttcccttcatcaatccccacgccacccctcgtataaaatcctctatagacctactctagtccccgtcccccttccaaacttttattgtctctctccctcactcctctctttccatcattctccgtctgacatacagaaacttcttttcgtccattcaccccttattacctacttctctctcccgcctccccgcgtcacctctctccctattctattatttccgcctccttctctcttctgttcctcgcctacattcgttacttcttccgcgctcccttgccttgacattcgacgcgatatctccccttcatatcactatacctttatcgttcactccatcccgtatttacattctcctacgtctccgatccccccttttatcccgcctcctcgcttccttgccccatccccgtccacacctcctctttcccat

SEQ ID NO: 5165 - DNA, 702 bp, Photorhabdus luminescens
  misc_feature (460)..(460): n is a, c, g, or t
tcagaatgtacctgttgttggtgaacgtgtttatattccagatcacaaagtatactttgcgtcctttgataacaaagaaacagcatattatttgtgcggattattgaattcattaactgttcaggaatggattaacagccacaatgtatccattcaagttgcggatgtattcaaacatctatcattacctaattttgatattactaacacgatgcatactaaccttgcagagcttgttgaagaggctcatcagtgtcacgacaaaacagaacgccagaaaattatcaagcgaataaaatcggtcgcggaggatgttttgatcacctggagtgtaacgctcgtagaataactgacaaagataagttggctattatggccaacatccttaactggcctgattatattcgcctgtctgtctccgaactggagcatgattacccgggtacatgtaggggacggncaaccccacctactcactgcatccactgcaagcatcctgaaatccgttggctttggccggcgtgatgaggtgatcatggatactcctgtcaatggcaagcggcaggggatatactgaatcggcgccgctacagttgcaaaattgttgtaagacgttaatggacccgtaccacacaagatgtaagccgcaaatgactaaccgtttgatccatacattgagcgtgagagttaacgcgcactttt

SEQ ID NO: 5166 - DNA, 785 bp, Photorhabdus luminescens
  misc_feature (677)..(677): n is a, c, g, or t
agctttattggcttgttctttaaccccagataatagattaacctgcgttgaacctgccaataaattacgcaatgcacttgccaccgcgttttgaccaggatgattttttacttgttgaatccgggcatcataatgttcatgagatgcaagtaatgcttcaacagcaagggcaatcgcagaaattgaggctttaaatagtttttccagtttaatgacggtgattgcactgattcctgacattacccgggtgccgttaatcagagcaagaccttctttggcttttaacgataatggtgtcaaccctgcacgtttaattgcttcagcagcgtcaatttctgcgcccatataataaactttgccgataccacataatgctcgtgcaatataagataaaggaattaaatcaccgcttgcacccactgagccatagcgaggaaccagaggaacaatgtcatgattaatatgatcaacaattgcttgagcgacaattggtctggttgcagaccaacctttgcaaacagaaagtaacatagtaaattgtgacgctttaatacaaggtttggacatatagtccccagtaccagcagaaagaaaagttaacagattttgctgatgctctgcgattttctcaaatggcacaactaaattggcattccctccaaatcctgtattgattncatatataacctctcctgaatttaatttttcctctaattcttcacgaccatgcgtcaaaagttcagggatctccgttgatatttctactttttttagtttatcgcaaa

SEQ ID NO: 5167 - DNA, 708 bp, Photorhabdus luminescens
aatattgtatgcaatacaaagaatcagattttgactttgtgacacgtcaactggaacacgcggggattttctatttctttcgccatgaagaaaggcgtcatgtactggtattggcagatcacccttcggcgtttattaacgcaccgttagcggtattgccatatcaatcgaagatgggtgatcagcaaggctatgggctacgcgcctggcatattcatcgcacaatgattccaggtacggcggaaatgaatggttataacgttaaaagtgctgcggcaatcagtgccagcgccaaagcgaacagcggctattctaccaatcccaagctttctatctatgacgaccgacgtcaggaggaacgtaaccaactggaaacacaggcaacgctgtgcatggaacaatgggaatcacagtcctattacgcacgcgccgttaacagttatcccagtttacaagtggggcatcagtttaccctgaaagggcacaccagcgccgatggccgttatgccgtcggccaccagcgattaaaagcggagaacaacctggaggaaggtgaattactgttttcgtctcaagtgaccttattcccggcgaataacgtattccgtccgcgtccttcggttacgcggccctacatttccggcgtattggccgcgttggtggtagggccgacgtcagaagatatccctaccgatgaacacggctcat

SEQ ID NO: 5168 - DNA, 754 bp, Photorhabdus luminescens
aagcttttagcatcgttcagcggaatcgctgcaatatcaatcggctctagacctttcttcgttctacgcgcgttgatcatctccaatgcccagttgataatggtcagtgttctcagcccgaggaagtcaaatttcaccaaccctgcatattccacatcatttttatcaaactgagtaaccgggttcaaaccttccgggtcacaatagagaggcgaaaaatcggtgatcttcgttggggcgataaccaccccacccgcatgtttccctgcattacgagtgacaccttccaatttacgcgccatatctatcagtgctttaacttcctcatccgcttcatagatttcaggaagttgtggctcagcggcaaatgctttctccaacgtcataccgggatcaagcggtatcaatttggaaatcctatcaacaaatccgtatggatgccctagcacgcggccaacatcccgaattactgctttcgctgccattgtaccgaatgtaatgatctgaaatacggcattaccaccatacatatcagccacatgatcaatcactagatcgcgtttttccatacaaaaatccacgtcaaaatcggccatgaaacacgttcagggttaaggatcgctcaagagcagatcatattccaaggatcgagatcgttatttttagggcatagccaccagagaacctgcttccgaacacgttccggaccacaggaacacgttgtctttcaccctgatgaatcctcacatccgaa

SEQ ID NO: 5169 - DNA, 693 bp, Photorhabdus luminescens
  misc_feature (448)..(448): n is a, c, g, or t
tggcattcatttaattcattacgttcttctgctgtcaggaaaccaaaatcgaccatttcatctatggaggttgcaccaaaatggcggcgggcaacccatagtaaggtatgaatgtctcgcaatcctccggggctgcttttgatatcaggttccaggttataactggtgctgtgatagcgctgatggcgttcgtgttgttcgacaattttggcatcaaagaattcagtggaaggccaaaaaccatcactgaaggtatgtcgctgtaatcgaagaaaaatggaggaatcgccacaaattaaccgtgattcgattaaattcgtcgcaatagtcagatctgataacccttccagcaaacactcttcaagtgtgcgaacactgtggccgacttccagtcggatatcccatagtaaagtgataaattgccccacatttctgagcttgaggccgngtgagtggttgctcactgagtatcacacgtcaatgtcagatagcggatgcagttcccgccggccatttccgccgacggcaatcaatgaaagtgatgaaattttatcaaatctataggcataccataattgcttgtacaactggtctatgtaatcactgcgtgcagaaatcatggcttctgcggaaatacccgctttaaatgcatgtcgcagccaaagctgaaatccttcgaggtgcctgtccaca

SEQ ID NO: 5170 - DNA, 780 bp, Photorhabdus luminescens
  misc_feature (641)..(641): n is a, c, g, or t
  misc_feature (654)..(654): n is a, c, g, or t
aagcttattactattccatataacaattattacgaactcatttgcccttttacccagcaaaaactcaatgttggcgataatcacgttgcgggcgaattagtgattacccatttatataaagggaacaaacctctgattcgatacaaaacaggggatatggttcgatgcaaagcaataggcttaaatcaatgggaaatagaacccatcggccgggtaaaagatgtattagtattaaacaatgccaatgtgtatgcttttgatattgaaaatgccatctttgaagaactcgaatattgttttgaatactttattgaaatcaacaacacagccggtacagataagctcaagatcactttagaaccgagtgacgaattaaatgatgcgtcactcatgagtaaaataaagcaaaaaatggaatctaaattcaatatgaatgtcgacatccatgtcggagatgtcggtggactgattggaaccgcggcaatggtaagttggaaagcagcacgcatccatgatctgagagatgataccaacaatattgagcgaaattcggctttagaaatcatgaacaagagggccaataaatgacaaacaatatcgttagcccagttaataaagattggatcgtatttctagacggngaatatctcaatnttagcaatgcgacctttcttgccaatacacaagctttaaattatggcaccggtacatttgaggggatccgggcttattgggatcaagacaataaccaacttaatctatttagagtgcatgagcact

SEQ ID NO: 5171 - DNA, 700 bp, Photorhabdus luminescens
tgttgttgttacaagagtcaattggcaaagagcgtcgtccgttgtcttgggtagtgggagatcaaggggtttaccgtgccaatatgcagtcagaaagagaacgtaagcacggggaacgtatcgcagtgaaaaatctgcgtacgccagacgaagtttaagaatctgtctttagacagtaggcgtgactcaaagtagcctaatgaatgtaaccagagcaatgtgttgcgatactaatcctgatcaaaacgaacactgatcaaagcgttgtggtgaagaatgatgatagatcagatagcgcaagaaagcgcccggcctgcgtggcaaactcatgaccatcttgatgatccggtcatgggtgagctgcgtaaccactttggcccggatgcctttactgttcagccaacccgtactggtatacccgttgtttgggtgaagcgtgaacaattactggaagtaatgactttcctgaagaagctgcctaaaccttatgtcatgctattcgatttgcatggcatggatgagcgtcagcgtactcatcgccagggtctgccagcagcagatttttctgtgttttatcacctgctttctattgagcgtaaccgcgatatcatgttgaaggttgccctcagtgaaaaagagctgaatctcccgacggcaactcctctgtctcccaatgccaattggtatgaacgtgaacatg

SEQ ID NO: 5172 - DNA, 766 bp, Photorhabdus luminescens
agtcagcacattggcaccccccgccagtaccgaggagaccttccccttacctgtttgggtcatcacattaaaaccgcctgcacctaaccaattggcgttgccattacctatttggctatgagtgttgtaacccccaaacatgctaactcggctatcgccattgccttgatggatcgagatattacctatcgccaaaagacgagccagatatcgcccatcaccgatccgaaccaatacattcgctgcaccgccggcgtaaacatccatttctccacgttggccttgatgaaccagtacgtttgccagacctgcaccacggaacgtcaaatcgccctgttccccctttttcacgatgacattagcagcacccgcgccttcaaaattgatattgccacgagttacactggaggtaatgacattgccaccgcccatgcccttgaaattaatgtcaccggagctgtcacccatatccgcggatgatttcaccaactcctgatgactatattcttctgtctgtgctaaatgttcagaaacacggcgcactgtattcacttggtattgcagattggttaacgaatatcctcctatatccattgagcgataaccattttggggggaaaccttttcagcagccagattgcttgtatgatcacccgctttgtaccacgcactggcgtaatattgcagcgcaccgcgtttagcatcatttttcaactcaaccatcactactttgtgatatgactcaccacactctggctatatatac

SEQ ID NO: 5173 - DNA, 692 bp, Photorhabdus luminescens
tgcggatgttacaaaaacaggcccaccagttgcgctggcaggccccggtctacctgtggcaggtgtgtcacagtacctggtctcaggaaggtcgtatcactcagaccgtcggctgcttttttcctgaacgctgtaccccggatatcgtggcgacacagttacaaacgttggttgacccgttgcgcgagcgcgggatgcagcaactgttggagaagacggcccacgattttctttgtcgtctgtccgcgaacttgaaacaacaggggattgcgcactggcaacaggtcctgacgccgtggttagcggagtatggtgatgtggtgtcgctgcggggtttgatgttcagtttgcccgttaaagcgcagacgactcgcctcccgcagatctggctgcccgacacggcatggcagggggtgttggagggcagtcgttgtttccacggtcggcgggtgggcatgctccacacacagaccgtttgtcgtggcctgatagtgctgggcttgttatggggggccggaatgatgctctcctttttcaccaaccgtgaccagctagctgtggtgcaggcggccgtcactgacctgaaagctcagccggagaattctgatgcccagttgatggccttaaaggcgctgcgtaacgaggtggaccggctgcaagaaccggctgaacacggtgtaccgtggtatgag

SEQ ID NO: 5174 - DNA, 764 bp, Photorhabdus luminescens
  misc_feature (603)..(603): n is a, c, g, or t
  misc_feature (714)..(714): n is a, c, g, or t
tcgccgccttgcggccatttctcccggtcaaaattaaacaccacccgatataagccgtctttgtcgatatcgccgtaggtatcattcactttggtactgctcacccgcgcgggtatcgtgccggccatcaccggtttcggcacccgctccgggcgaaagcacacggtctcggaatagggaatggcagtgaatgtcatctcaaaactgctgtcccggcgggcactgttggtgatctgggtgatgatcgcccctttgcgaaacgtttccggggcgtcacctttcactttcaactcctgtcccggcaccagcgtggcggaggtggtcattccccgcaggcggatgcgttgattcaggtaacgttcgtgatgcaaacgggcataaaacaccccgctttccgtctccggttgataggcgtaacgatcaccgggtattcggtagtcgtcacggtaatggtacgcttcgccataagtcgttcgatcgccccgtgtcacatccgcctcggtgttcaagccgggatacggccgggcatcgtggtagtcataattccgagtcgcaattttcccttcacacctgatacgcggtctccatgccccacaccaccgngtcctcctcgccgtgcatacctgacggattgcgggcaggcaggtagacattgaactggtagtcacgctggtcgtcgtaaactccaccactcgatctttaaccgtcatccgncgtcactttgtacagatcccactttcggcacatgcgttggtaaacgcagg

SEQ ID NO: 5175 - DNA, 703 bp, Photorhabdus luminescens
  misc_feature (634)..(634): n is a, c, g, or t
aataagctcctcactgccatcaagcggtaataataagaggtgagaaaagaatgactaaacaaatcatgccaataacactgtcttatgaaccagcagcagcttgctggggtgaaaaagcgctgattagttccagtgagcaaggggtgatggttcacctggttggtaaaggtaaattaggggcagtgcaacgtgctggacgtaaaattgacgggcagggaattcgtcatgtggctctggtgggtgaaggttgggatttagagaaaagttgggctttctggcaaggcttccgtgcgccgaaaggtaatcgttctattgaatggcctcaattacctgcggctgaaaaacaggaattggaaagcagaattaaaattattgattgggtgcgtgacaccatcaacatgtcagcggaagagcttgggccggaacaattggcgaagcgtgcgattgacctgatgtgtggtatggcttgtgaatcagtaagttatcgcattattaaaggcgaagatttacgtgagcagggttatacgggtattcacaccgttggccgcggttcttcgcgtgatcctacttatgtgtcggcgaagattacacacaactggcaacccgcaagcgccggtgtttgcctgtctggtangtaaaggcgtcacatttgatactggcggctaccagcctgaacaatcttcctttatggattccatgaaat

SEQ ID NO: 5176 - DNA, 776 bp, Photorhabdus luminescens
  misc_feature (688)..(688): n is a, c, g, or t
atatgcgcaacatactgccccatgctgcccattttcgtgtactggcaattgatatgctgggacatggcttcacggataaacctgtccgttcctatgagattatcgattatgtggaacacctacgggatcttattgaaacattaaatctgaagaaaattcacctttctggcgagtcgctaggcggatgggttgcagcccggtttgcggcaaaatatccgcaatatattcaccgtctggtgttgaacaccgccggtggcatgattgctgatccaaatgtgatggaacgcctgcgcacactgagcttaaatgcagtgaaaaaccccgatcgggaagctacccgcaaacgtcttgaattcctaatggaagatcctgcaatggtgacagaagacttggttgaaacccgttttgccatttatcgtcagccgggtatgttgtccgcaatggaaaacatcatgtgcctgcaagatatggatacccgtttacgtaaccttttgaccaaagatgaactggcaaagatccaggctgaaaccttagtgctatggaccacacacgatccgactgctgcggtttcagtaggccagcgtcttgccgggcttatcaaaaatagccgttttgtcgtgatggaaaaatgcggtcactggcctcaatatgaagacccggacacatttaaccggctccatatcgattntttactcaacggcaacaaataaatgtccctttcagacgagtgatattccaattggaatgtcacttctatggtttgagcaggagcaacc

SEQ ID NO: 5177 - DNA, 686 bp, Photorhabdus luminescens
  misc_feature (581)..(581): n is a, c, g, or t
gatacagagttgtgcaggtatcaatgatgtactgaaagtccggactgaaccaagagaattcgcagcatcaattcgcgttcctgttcgtccggcatatctgatttctttgccagattcagttccttatgattggatatccacactctgcttatcagggagagtcgggcaaatttatcaacaggcaacaacttataccgatgacgttgttagcgccataattaccggcaatagtgatgtacaacttactgaacgaattgaacattttgccgactggatcgatgatttagtcaggtggcaaaactgatgaaattccttttaaccctgtgttttgagagaagactataatgaaaatccttatagcaggttcaggtgccggcgcacaggcgctggcatggaaattattacaggacccagcagtagaaaaagtatggttagccccaggtaatccggctacgtcatgcgcacccggaatggaaaatattccagtgtcttcaggagatgttgaggggctggctagggctgctctggaactaaaagcagactttacgcttatcacaccgacccaaactttggcagctggngtagccgactactttaaatctcgtgggttaccaatcattgccccgactcgtgaagcctcccgacttgaatggtcgaaaggcttttccaaaaattcatgaaaaatt

SEQ ID NO: 5178 - DNA, 780 bp, Photorhabdus luminescens
caacggcagtgggcatcactgtgcaattgaagaagtttagtggaacagaatggtccccagatttaaaggacgatgaaccgtttcatctggctaataaaggcacaatcgtaaacgataaaacgcctactgtgccggtgaaattttcactggtatgtgctttggcaggcgggcagacggtagcggtctgcaaaaaggcaggaaaaatcaaggctacactgacgtttacgtttaattatcgttgatgtatcggcattgcagcgtggtatcgcgttaacagaagagtgatagggttaatttgaggtgagcacgatgtttgggacagcgacagaacaaaaaaaaagcaggctgaatgacccgtcgaccttcctgcccaagggtagaaacccggtattgcaggttgtgatgcgctgcttctgctggagttctgtaatggttctgctgttcctggcaagcagcgtcatggctgatgaccccaatcccaagcccaagaccgggcccaagtacccaccgacgatcacgagtgggatagacgtacaggtgaatgtaactgtttatcctgatccttgtgacataaagaatcaatggggatgatattaatggttcggagctgaattttggttccctgctggccgcggagtttagtcatgaaggggatgtatcagccaccaagtcatttaagttgaaattaacgaattgtggcgatccggatagtgtgggctttgtccccagcctcactgtatctggaattaccatcgacgctgaacagggttcaatatttag

SEQ ID NO: 5179 - DNA, 706 bp, Photorhabdus luminescens
  misc_feature (472)..(472): n is a, c, g, or t
ccacgttgagtggcggtagcatcactatcgatgctgataaagatgtcactctacgtggttctaatctggtgacgaccacaggtgatgctaaaatcaccggtgagaatgttcatctgttagccgaggataataaaaaatccgaagaaaaatctcagagtaaaaagtacgttggggcctatcttaccggaggaatcgataaagtcggttccggtatttatggtcgttatgaaggaaataacagtaatcataccagtacaactgctgttgtttccggttctcagatcgcaggtaatttgaacattaaagccaacggtgaattggttcaggaagggacgaagcatgaagtcaatggcacctataccgcagaggcaggcaaagtcagcaatctggctgtatcgaatacagaatcaagtaccaatcacaaactacaggttggtacagatattggtgtcaacgtagattatagcgctgntactcgcccgattgagaaagtggttaaagaacctgctaaatctgcactggatggcactttaaccacacaaggcacacttattttcggccgcggctattcgcccctacctgttttacccttcacgaccgccaccatcttcttctcaccttcccttcctccccatttcctccctcacaccatcttcgcgcaccgccccactcctctccccttttctaccctctcgccttcctcgca

SEQ ID NO: 5180 - DNA, 768 bp, Photorhabdus luminescens
cgtttttttcatctgcccctttatcacgaaacaagctcttatcattcgtaccaacatgatttccggtaacggtaatcgtgggagtaatactgttgctattgaccacactcgtgcaatttctcagcgtaatctgaatttccctgttaacttttcctaataccaagtctgcaaactgcactatgcccagctcgatattattgctgtccacaatgacatcacacgtgccttgcgtaatttcggccctaaatgtggccccaacagaattcgctgcccacaagggaccagaaaagagccacagaaccccacccatgccgatgtaattcaggtacctgcgtagatgctgaacccttgagatatcggctttactgaatttcaccatcgaagttctctccaccgccgagatcgctaatcaccgcccattccaccttctttttattctgactattctgagcgggataaacatgggtgctgaaaggtgccaacatttgtggatgactgtcagaaaacttcaccggcacaccatcaactttaatctgggtaaaactgatgtgataaggcgaattattactaacttgaacgccaccgggagcatgggtaaaacgcagcgctttgtatgccagctctggcgtacccaccaaccccgttggccgataaaatagtttgatggtattgccgatggcatagactactccacccgcaatcttgtcaccttcaagacgctgcccagaaggcttactgctgggaatagcagcagcattaaaataaaag

SEQ ID NO: 5181 - DNA, 694 bp, Photorhabdus luminescens
ttcaacgcattggggtttcgttgggaccggtctgcggctcctcttattgttcctattcattctattgagcgggtatgcttccgctttcatcggatgctgccagaatttgtttgggatgctggtgtacttgaaggcaatccctttactttccccgaagtgaaaacattgttggacggtgtcaccgtcggcggtaggaaggtttctgatcagcaacagatcttaaatcttgcagagagtgccaggcgcttactagttttagtgaaaaccggtcaatttgaattgaccaaagccacattcgcagaacttcatagcatcgttgcttgtaatgaagctttggagtggggaatgttccgtggggaagggcaggagacaaattacactccagatgtcagtttgggcaatcaggggcgtcatacgccgttgcctactgagtctggcgcaccagaattgaatcgtgtttttcacgagggtcttgctgcattgcgtgaatgtcggccttttgaacagggagctgcattctttcttttcggggcgctacagcaatttttctttgatggtaacaaacgcacttcacgtttcatgatgaacggtatcttgatgtcgaacggcatcgatgcaatcagtgtgcctgcggcaaaactgtatgagttcaacgaaacaatggtccgcttctacctgagcaaagatgctactg

SEQ ID NO: 5182 - DNA, 760 bp, Photorhabdus luminescens
  misc_feature (750)..(750): n is a, c, g, or t
ttgacgcagtaattcggtatttacattatttgtcatgatttttttctcctaaagacacttgtgtgaggggttttcgccggtagaaagtggctagctgctggcataaccaactcaatccagcacaaacagtcattacaagggccatagcaaaaggggtttcatcttgtagtaaagagacggcaacactggcgaatgccgccatagcaaattgtgcggaaatagcgagcgcactggcgctgccggcaagttgaccgcgatgttgaagtaataaagagaggctgttagtaccaatggcattaaccagcgagataaacagtacgaccaaaatgacgatcaccgtcagactttgctgataaaagataaccaataagatgccgaacagtaattgagcactggtttggataaataacagacgggaaacatcgtagacttttagtaaacggacattgagcagcactactgccatcatgcctagcgcattacaggcgaacagtaagccgtagtaattcgccggaacctgaaaatagttgatatagacgaaaggggaaccactgataaatgcgaacatggcggcacaagtgaatgccaatgtgccgatagttgccatagcttcaccgtcagtcagtaacttgccgtaatttttaaacgcagtgataagttttccgccgttatgctgggcgggtagcgtttctggcaagaaaaatagtaataatattccactgatacaaccgaacaggcccaatagcgtanatatggcctg

SEQ ID NO: 5183 - DNA, 775 bp, Photorhabdus luminescens
tgccgaaaattaatcaaacttaatttaagccagaatacgagtaccgacgggaacaccgttaaatagatcggtcagttgatctgcatgacgccaactggcgatatctaccggacgatctaatgtcctggctgcatctagagcggcattcaccttcacaatcataccgtcagtaatgatgccatgagcaataagctgttctgctttctcaacatttatgtcagggattttctgccctttaccatccaaaataccgctaacatcagagagcaataccaaatcagcacctagcgtctgagctatcgccgttgctgcttgatcggcattcacattcatcagctcccctttatccgttaccccaatcgagctgataatgggcatataacccgcatccaataacgttttcagcaacttagcatcgcccggcatcgcttttcccacatgccccaactcttcactcagttgggaaaccgtgaccacattaccatctcctaaatataatccaactgatgcaagttgatatttagtcgcccacgacaacaaggtcttattggcgataccagccaatgcgccggtgataatcccaatctgatcagcgggtgttactcgtaatccttgttccttcactatcggtagctgcaacttctccatcagctcatccaccagatatccccccccatgaacaacaaccaactggcgttcatgtgtttgccgatattcctgcaatgcagtaaacacacgttccaatgcttcttcattgtccagtaacacgccacct

SEQ ID NO: 5184 - DNA, 689 bp, Photorhabdus luminescens
  misc_feature (689)..(689): n is a, c, g, or t
tgagttcgatggtggtgaacaggcgatacgccgttttctgtctgagttgaagttatttactttggcggaatcactgggcggtgtggaaaccttaatttctcatacggctaccatgactcacgctggaatgtcagcacaggcaagggcggaagcggggattacggattcactattgcgtgtttctgtgggtattgaagatagtcaggatttaatcgctgatttggaaaatgcatttcaggcagtagtaaaggagtgaccatgggtgcactggtagttgcaacggcggaaaatgaccgccaattacataagtttggtggaagtagtctcgcggatgtgaaatgttatcaacgggtagccaagattatggctaattacagccaacccggtgatttaatggtggtatccgcggcaggcagcacgactaaccagttaattaattggcttaaacttagccagagcgaccgtatttctgctcatcaggtacagcaggttctgcgccgttatcagcaggatctgattagaggtttgctacctgagactgttgctgaagagttggtgaagcgttttattgccgatcttgaaaagctaagtgcattactggataaaccagttagtgatgtgacttatgcagaagtggtggggcaccgagagatctggtttgcgcgtttgagtccgctgtgcctgaactn

SEQ ID NO: 5185 - DNA, 762 bp, Photorhabdus luminescens
  misc_feature (621)..(621): n is a, c, g, or t
  misc_feature (699)..(699): n is a, c, g, or t
tattggcttgttctttaaccccagataatagattaacctgcgttgaacctgccaataaattacgcaatgcacttgccaccgcgttttgaccaggatgattttttacttgttgaatccgggcatcataatgttcatgagatgcaagtaatgcttcaacagcaagggcaatcgcagaaattgaggctttaaatagtttttccagtttaatgacggtgattgcactgattcctgacattacccgggtgccgttaatcagagcaagaccttctttggcttttaacgataatggtgtcaaccctgcacgtttaattgcttcagcagcgtcaatttctgcgcccatataataaactttgccgataccacataatgctcgtgcaatataagataaaggaattaaatcaccgcttgcacccactgagccatagcgaggaaccagaggaacaatgtcatgattaatatgatcaacaattgcttgagcgacaattggtctggttgcagaccaacctttgcaaacagaaagtaacatagtaaattgtgacgctttaatacaaggtttggacatatagtccccagtaccagcagaaagaaaagttaacagattttgctgatgctctgcgattntctcaaatggcacaactaaattggcattccctccaaatcctgtattgattccatatataacctctcctgaatttattnttcctctaattttcacgaccatgcgtcaaaagttcagtgatctccgttgatatttctactttt

SEQ ID NO: 5186 - DNA, 691 bp, Photorhabdus luminescens
aatattgtatgcaatacaaagaatcagattttgactttgtgacacgtcaactggaacacgcggggattttctatttctttcgccatgaagaaaggcgtcatgtactggtattggcagatcacccttcggcgtttattaacgcaccgttagcggtattgccatatcaatcgaagatgggtgatcagcaaggctatgggctacgcgcctggcatattcatcgcacaatgattccaggtacggcggaaatgaatggttataacgttaaaagtgctgcggcaatcagtgccagcgccaaagcgaacagcggctattctaccaatcccaagctttctatctatgacgaccgacgtcaggaggaacgtaaccaactggaaacacaggcaacgctgtgcatggaacaatgggaatcacagtcctattacgcacgcgccgttaacagttatcccagtttacaagtggggcatcagtttaccctgaaagggcacaccagcgccgatggccgttatgccgtcggccaccagcgattaaaagcggagaacaacctggaggaaggtgaattactgttttcgtctcaggtgaccttattcccggcgaataacgtattccgtccgcgtccttcggttacgcgggcctacatttccggcgtattgtccgcgttggtggtagggccgacctcagaagagaccatacg

SEQ ID NO: 5187 - DNA, 770 bp, Photorhabdus luminescens
  misc_feature (770)..(770): n is a, c, g, or t
aagcttacccaataataagttacacgttggtgaacactcaaggttcagaaacttgccgaggttcacacgactcttgtccagcaaacctaccccttcgaatagcctatgccggcactatatgcaagtttttgggaaaaaaacattgctgtaacgtggggtcgcaagattatagagaagtcaaaaataaaaatcgacccccatttgaatatttaaaatcagttttccgtctgaaatagataagcgaactcaaacttaaggtaaatgaggtaatttgagatactcttcactttgcatctcttgcaaacgggataagcaacgctggtattcgaaaaccaacaacaccccttggtaaatctgctccatcggcaccgccgcattaattatcaattttacccggcgttcataaaattcatcaaccaatgccaagaaacgacgagcagcattttcattacccggcattatcgctggaacctggtataacaaaaccgtgtgataacgttttgataaaacaatgtaatccatctgactacgcgcatcttcacataagacgttaaatccaattgccaatacaccatcagcgtcacgaattgccggcatccgccgatggttaatttccaatatagaagcttgttcaccgctattaccggccaaaagaataaacattcgatccatcgctcggttattatcttcattcagcggtgtgaatagagatgagcttgagtcaacgtgcgcaaccgatagtcaatacccgaatccacattcataacgtn

SEQ ID NO: 5188 - DNA, 679 bp, Photorhabdus luminescens
  misc_feature (569)..(569): n is a, c, g, or t
taatatctctgtattttcgcttttaaatggtcatgacagatttggtaattgatggataactgagttaatcatctttaatgcttttatacccgtcatctttcaagttgcctctttgttggctgcactcgctcaccccggtcacatagttacctatgctcccggggattcactcccttgccgtcgcgatgcatcttgaaatccatagggtatatacctgtgctcattgaaactgcttgattttcgcccaaatgaagctcatggtatcagtcatgaaaatattcattaccgatgaacaaaaagccgaacttgaacacctccatcacacctgccgtgataagagagagtgtgatcgcatcaaagcggtcctgctggcctctgagggctggagttcagtgatgatcgctcaggccctgcgtcttcatgaaacgaccgttaatcgtcatatcagtgattaccttaatcaccgcaaaatcaagcccgaaaatggcggctctcagagccatctcagcgaaacacagactcaggaacctatcgcttatctgaccgcgaatcttctgcccaccacacangctgttatccgccttgtcaagaagcgtgggatattcagtacactggtccccgcatgaataaatggctgcaccataatggattaagttattaaaaaccgaccggctgccac

SEQ ID NO: 5189 - DNA, 783 bp, Photorhabdus luminescens
tactaccagatggatatcacggcaatactgccacatcctgaggcgaatggaacataaggaaacctgttgaaaaacaaagcacatagtacgttgttggtaagagctaaccgccattccgtgagcagcaatacagatttcagctaactctattctaccaattagttaaacaagtagtttgttaaacttgacccagaagagtttacagtctaatctccccccaactagttacaaaatcttatcccccattactttttgttaagacagacaaaagtattggaaaatcagtgcaatagataagatttccgaatattacaggcactctgggagccaaaaacctagtgcggtagctttatctaatgactcttaaatatgttgatttagatttttcatctctataaatacgtatgcaagaaaatttccacgtgttaggcaaaagctattaaataatttcatttagtggttctcgtgaaattaccccagacttaaaaacaatatattatttggtcaaattcatatgaaaggcatcatcttagccggtggttccggcaccagattataccctataacaataggtgtatctaaacagctcctcccggtatacgataagccaatgatctattatccattatcagtactgatgctagcagggataaaagacattcttattattacaacccctgaagatcaaataaacttcaaacgccttttgaacgacggaaatagcttaggaataaagattagttacgcaactcaggataaacctgaaggactgggcccagcatt

SEQ ID NO: 5190 - DNA, 697 bp, Photorhabdus luminescens
tgcgacaacagccccaaatcagtcaatccctgaatattcgagtgaccccgcaatgcattaacaccgccacctgccatccccatattgcccaacagtagctggattattgccatagtccggatgttctgtgcacccactgagtgttgagtccaacccagcgcgtacagaaaagaagcggtcttatccttaacacaagtttctgcaatatattcacagactttcaggaagtcctcttttggcgtaccgcaaatattactgacgacatctggcgtgtaacgactaacgtgctcttttagcagattccatacacaacgtgggtgcttaagtgtgatatcacgttgagcaaagccgttttcatccagtgcatagttccaactggttttatcgtattgacgtttttctgcatcgtaaccactgaacaaaccatcatcgaacgagtaatcttcacgcacgatcagactggcgttggtatacgcctcgacatattcatgattaatcttatcgttggtcagtaggtataaaatgacacctgacaagaaagcaatatcagtaccagaacggattggagtatagaaatccgccacagatgctgtacgggtaaaacgcggatcaatcacaattaacttagcgttattatggattttggcttccattgcccagcggaatcccactggatgtgcttcggcagcgttaccaa

SEQ ID NO: 5191 - DNA, 690 bp, Photorhabdus luminescens
tcctgtgaccagacattattgtcctttgtctgctcaccaaccttttgaacagagtatcgccaccgttgtattgcggttactccaacaggagcaaggttctgtgctgttgtttttgccgggtagcggggaaattcaacgggtgtttggactgcttagcgggagagtggctgaggataccgatttgtgcccgttatacggtgcgttgtcattggctgagcaacaaaaagcgatcgaaccttcaccatctggacgccgtaaagttgttttggcgactaatattgcagaaaccagtttaacgattgaaggtattcggttggtgattgatagtggtcttgaacgcacgacgcgttttgaacccaaaaatggtctgactcgcctgatcactcaacgtatcagtcaagcttctatgacacaacgagctggtcgggcaggaacggtagaagcccggtgtgtgttggcatctattcagcccagaacaggcagaaagagcggtagagcatattgagcccgaattctgaatgctgatctcacgagcttatggctcttcttattgtatgtggtggcgcactgattttcctaattgcactgctagacatacccactgcggcgggcctcgccgggggtaagctctctgcctcacaggtaggcgccacccgccccgcggtcactaactccccaggccctaaaggg

SEQ ID NO: 5192 - DNA, 791 bp, Photorhabdus luminescens
  misc_feature (761)..(761): n is a, c, g, or t
attcattgaaattttgattaattgtaaatcccgaccactgtgaaccgcctccccaaaagtaggatacccagcaagtaagggaaagttctgtatgaagaattgcagtaaacaattactcaaatttaagtgtaaagtcgcccaatattatctttctaccaccagatgagataactagatgattaataaaatcaaacagtttacactaaatcggctaataacacctgagtccgaaattctgccggattcaggaaatttaattttgagccgagttatcaaactgctgataattttttcaatatcgaataatacctcattacaccagcaagggtaaaaagcctagcagattaatcagccagaaaagtgatcaccgttggacaggtattttagcgttaacaaagcacgaaaaaagtttagaaaataaggatatgaattgattttaatcccagatcacattaaagacataaaaagcagcatagtttaaatcaaatcgtagactaaactgattaaaacagtgtaaagccgtttaatccagagtattttacagttttacataataaatgaaaaataataacactgtaattaaccagattcgtattctgttaaatcattcacttgaacttttttatgacagattatttaactggtttatggaaaaatttataccatttaaaaaaattattaaagtctgctcctttgggaaatagaattgttgattaattactcatatgatcatattccctcttttccagaacatgaacatntacaaaccaatttttttcttatttttcaca

SEQ ID NO: 5193 - DNA, 706 bp, Photorhabdus luminescens
cgtggatatctttaccaatggctacaccgcatgggttagcgtgcttaacaataacgcatgcaggctccacgaattccttaacacattccagcgctgcatcggtatcagcaatgttattataggaaagagccttaccttgtaactgagttgcagttgcaatggatgattcagaaagattctcttctatatagaatgcagcatcttggtggctgttctcaccgtaacgcatatcctgctttttaatgaaattcaaattcagagtacgagggaaacgtcctgatggttgagtcgtatcaccatgataaggaggaaccagcttgccaaaatagttagcaatcatgctgtcataagccgcggtgtgttcaaaagccttaatggctaaatcgaagcgggttgattgtgttaatgacccctgattgttatccatctcttcaatgatttttttgtaatccttactatttaccacaatcgctacatctttatggttcttagccgcagagcgaaccatagttggaccaccgatatcaatgttttcaacggcatctgccaaagtacaatctggtttagctacggtctgagcgaatggatatagattcacaaccaccatatcgatcggtgagacctggtgttgtgccatgatttcatcatcttgtccgcggcggccaaggattccgccatgtactttaggatgcagccgcttaacacg

SEQ ID NO: 5194 - DNA, 783 bp, Photorhabdus luminescens
  misc_feature (634)..(634): n is a, c, g, or t
tagatgcaacaattctcaacacagcattgcccgctattgctgaaagcctcaaacattcacctctggcgatgcaatctgctgttgtcagctatactctgactgtcgctttgctaattccagtcagtggctggttagcagatcgtttcggtacccgccggatatttatgtttgctgtatccttattttctttaggctcccttgcctgtgctttgtcaggtaatttagcttttctagtggtttcacgtgtaattcaaggaattggtggcgcaatgatgatgccagttgcccgtcttgctttattacgtgcatacccacgcagcgaacttctacctgttatgaattttgtcaccataccagggttagtaggaccaattcttggtcccatgctcggcgggctattagtcacttatgctacctggcactggatatttattatcaatattccaatcggtttattggggattatttacgctaaaaagcatatgcctaattttacaatgccaaaacgttcatttgactttttcggtttcatactttttgggctgagtttaatcatggtttctgtcagtttggatttactaggagagagttcgttacccggctatatacctctgacaattatggttggtggttntatgatattatttggttatctgatgcatgctagaaaacaaccccaaccccttatcagcctggaattattccgtattcgcacattctctatcggtattataggtaatattgttacacgcttgggaacgggttgcatcccttcctgatgcc

SEQ ID NO: 5195 - DNA, 697 bp, Photorhabdus luminescens
  misc_feature (620)..(620): n is a, c, g, or t
cgcaacttgatcgaagaagacgcgtacatcgaacgtggtgaacgacgccaaccggttagcagttttgaacaagcgctaaactggttgactaaagagtctcgccgtgggttgtctatacagcgttataaaggtttgggagaaatgaaccctgaacagttatgggaaacaaccatgaacccggaaactcgccgcatgatgcgtgtgacagtaaaagatgccattgcaactgaccaactgtttacaactctgatgggtgatgctgttgaacctcgtcgagcatttattgaagagaatgccctgaaagcagctaatattgatatctagttgatattattataaatttaaaaaagcgctcatattgattctctatgagcgctttttttatctgttatttataaccaataaagtgtaatttatttaatgtttctgtaaaacatcacttaaatataatctaagggtataatatggctgacatgatttacatgacaataaagggaaaaaaacaaggattaatatcggctggatgttcttctgttgattccattggtaataaatatcaagcaaaccactttgatcagatattagtttatagcttaagccatgcgataacacggactcanaatgtcgatcatcaacccattattatccaaaaacctatcgacaatcatcaccattactcggtgttgctatttctgag

SEQ ID NO: 5196 - DNA, 764 bp, Photorhabdus luminescens
  misc_feature (740)..(740): n is a, c, g, or t
  misc_feature (764)..(764): n is a, c, g, or t
taatatctctgtattttcgcttttaaatggtcatgacagatttggtaattgatggataactgagttaatcatctttaatgcttttatacccgtcatctttcaagttgcctctttgttggctgcactcgctcaccccggtcacatagttacctatgctcccggggattcactcccttgccgtcgcgatgcatcttgaaatccatagggtatatacctgtgctcattgaaactgcttgattttcgcccaaatgaagctcatggtatcagtcatgaaaatattcattaccgatgaacaaaaagccgaacttgaacacctccatcacacctgccgtgataagagagagtgtgatcgcatcaaagcggtcctgctggcctctgagggctggagttcagtgatgatcgctcaggccctgcgtcttcatgaaacgaccgttaatcgtcatatcagtgattaccttaatcaccgcaaaatcaagcccgaaaatggcggctctcagagccatctcagcgaaacacagactcaggaacttatcgcttatctgaccgcgaatcttctgcccaccacacaggctgttatccgccttgtcaaagaagcgtgggatatcagttacactgttcccggcatgaataaatggctgcaccataatggatttagttataaaaaaccgaccggcgtgccacacaagttcaacgcggagcagcaacgggcctttatggaaacctacgggaaactcaagcangaagccggagaccatgagcctatn

SEQ ID NO: 5197 - DNA, 681 bp, Photorhabdus luminescens
  misc_feature (590)..(590): n is a, c, g, or t
ctattttccgccggctaagcgtattcgacaacctgatggctgtattggagatccgccaggatctgactcaagaacagcggaaagaacgtgccgaagagctgatggaagagttccatatcagccacctacgtgacaatcttggtcaatcactttccggaggtgaacgtcgccgcgtagagattgccagagcgctggcagctaatccgaaatttattttgctggatgagcctttcgccggcgtagatcctatctcagtcatcgatatcaagaaaatcattcagcatttgagagattatggactaggggtccttatcacagaccacaatgtccgtgaaacattggatgtatgcgaacgtgcttatattgtcagccaagggcatctgattgctcacggcacacctaatgatattcttaataatgaacaggtgaagcgcgtttatttaggcgaaggtttccggctctaattcggccaggagaattgatttaacgctatgaagcaaagtttgcaactcaagcttagtcagcaactggctatgacaccacagctccaacaagctattcgtttgttgcaactttctacgcttgaactncaacaggaaatacaacaagcgttagaaatgaatcctttgcttgaacaggatgaagaacatcaggagaatggccatcaggaaccttccgata

SEQ ID NO: 5198 - DNA, 772 bp, Photorhabdus luminescens
aagcttataaatagagctaaactcaaacgcttctgtatctgccgtaccggtcatacccgccagtttttcatacaaccggaagtagttttggaaggtaattgaagctagggtttggttttcattctgaatttctacaccttctttagcttcaacagcctgatgcaatccatcagaccagcgacgcccctgcatagtacggcccgtatgctcatcaacaataatgacctcaccatctttcacgatatagtcaacatcacgggtaaacagtgcatgggcacgtagtgcggctgtaacatggtgcattaacatgatattggttggcgaatatagggattcaccttcttccatcaagctggcttctgacagtaattgttcaatcaaaactaaaccgcgttccgtcaagttaacctggcgggacttttcgtcgacagaaaaatggccttctccctggaaagtctctgaatcctctttttcctgacgaatcaatttagggatcaacttattgactttgatataaagctcagaactatcttcagcagggccagagataatcaatggcgtccgtgcttcgtcgattagaatggagtcaacttcatccactagcgcataatgtaacttacgctgaacacgctcttccgggctaaatgccatgttgtcacgcagatagtcaaagccatattcgttgttagtaccataggttatatccgcagcatatgcctggcgtttaacgggtgccggcatacctgtcacgttaataccacactcaatccca

SEQ ID NO: 5199 - DNA, 778 bp, Photorhabdus luminescens
acgcgcacccgatgtcatgatggatactgatggtgatttctatctgttggaagtgaatacctctccggggatgaccagccacagcttggtgccgatggctgcgcgtcaggctggattaagtttttcacagttggtggtaaagattttggagttggctgattgatatgtctcaagcggccctgaaagtgaggggacgggataatgaaagtagcagttcccgtcctagtaacggctcttacctggcagggcttatcttcttcctgatggtacttgggaccattatttggggaggtttggccgtccttaactggatgaaagatgctaacagattgcctatttcaaaactggtggtaacgggtgagcgtcactacacgaccaacgatgatatccggcgggcaattttgtcattagggcaaccgggaactttcatgacgcaggatgtgaatatcattcagcaacaaattgaacggatgccgtggataaggcaagtcactgtccgtaatcagcggcctgatgaactgagaattcatctggtagaatatgttccttatgtgcgctggaatgacacacagatgctggatgccgaaggtcacgttttcaacattccggctgaatggggagctaaagggccttttcccattctttacggcccacattgcagtgaaaaacaagttactcgaccgtttcacggcccttacttaacttcccgctgcccttaactgcaattatatctgcggcccctgccgcgcctttcatcttgcaactgacccttaaaatg

SEQ ID NO: 5200 - DNA, 774 bp, Photorhabdus luminescens
  misc_feature (627)..(627): n is a, c, g, or t
ctgcacacaacaattttttcactataaactccttaaaccacgctatctgtaacctattggaaaacttagttaatgctctgaaacctacgatttcagagcttgctctatcaataataagataaaaacgcattatcaccaggttttgccaatattaaattggaattgctctgatctatcaccttcgtaatctttgatcggcttagcataagagaacaccagtggacctaaaggagacacccattgcaatgcaatacccgctgaaacgcggatattacctggtttaccgtaatcaggtataccactgcctttcatcgcagcagaatcattccaataagtatcccaaaccgtacctgaatcaataaagaatgaagttcggacagaattcgaatacttactatcgaggaatggcgtcggagtaatcaactcaaggctggctaccgccattgcgttcccccccacggcatcgcgagatgggctatctttcttagggtcatcttttccattcatataaatcgctttagggccgatattgttagaacggaaaccacgaaccgtactggagccacctgcataaaagttttcatagaatggtaactctttaccgcctaatccatcaccataacctanacggctgcgccccaagatcacccaagtacgatcgtcattaatcggataatacgcagaggtatcaaaagttactttatagaattcgttatccgaaccaggaatagtcactttaccattcagcgtcgatttcacaccggatgttgggag

SEQ ID NO: 5201 - DNA, 689 bp, Photorhabdus luminescens
tttcagaaggcccatcgttagttggatttgatgctaagcattacaacgtggctaaaaacagttgcgtggatttcgtatttgcatcattaaaagccgttggctataacgaaaaaggtttcgagggagaactgttccctaatcataatcctatgcatttgcgtgatatgttgcaaaataatggaagtcgaattatccgtgacaacttgagtcgttatattcgttatagtgacttttattatctggacgatgaaagtggtcgagcgtgtttatggcttaggccagaggatacgaaaatcactctaccgatgaagccattgattaacatcgatatcgtgtccacgccaaaacctctgcggcatattcagggcgaaaacaaagctcagcaggatgttgctaacgggtttatacaaaattctgcaacacataaaatatctgccgtcggggatatgctcaataaaacagactttgcctccacccagatggcaggtcttgccaccggtggcattcgtcccggtgaaatgcagctcgaccccaatgtcaagcccaacagctatctgtcggagttctacaagcctttctaccaacccggagacactagcaagctggacttctgcctgcgcaacgctgtgacgttgaacggtttatcggcgatgacaacgtttaacacttatgttgacccgctgttattg

SEQ ID NO: 5202 - DNA, 779 bp, Photorhabdus luminescens
aagcttgtactgtccgcgggaagctggatgttcaaaataaccgctgtattcgtcaggtacagtggttttttgtttgatcaatttgtttgatcaaatagcactgagcgcaggcccttccttcagataggggataagtagttatcggagtgtgtaaacttgacgttaaacactccgaattttttgacattaagtggatgtcccgccgtaaccgaatagcggctggcgtagccagagggcggggagataccctcttgtatgatttaaagggatttttgatgggaaaagcatctaatagaagtgcagtgtacctctttacaggaagatattacgacgataatggcggtaatcgtattactgctgttggggctggtggtgaagtttatgcttatggcggaaatgatgatgttaccgttggttcatttaaagtcgatgtataccatacagatggcgaccttacggtaaagggagtgtcaggttataccggtattcataaaacgggaaatggcgggctgtcatttacgggggctgccggtgtagctgctattgatcacacgggtgaaacgggaaatttaaattattcgggtgcggccggttataataaactggtccgtaaagggttgtctggtgatactcgttttagaggggccggtggatacaatcagttatggcatgaaactaaccggggaaatttagattttgctggtgcaggggcaggcaatgacattaaccgtacctggtttaaccgttatcaagattcacagggaaatgtgatatttaat

SEQ ID NO: 5203 - DNA, 683 bp, Photorhabdus luminescens
cctgatatcaatctgtccgtcgagtacgggtgagtcagcagtactttgcatatacagctcaaactcctgcaccagaaactgacctatccgcctggaggtggctagcgcatccggtgacgccatttttaccaacgtatgggccacttcggaatcaaaacgacgaccaaataagttgtcaatatattgggtagttgacttttctctgtgagcatcagcctgtaatgacagtaccaaaccatgtaactcagggtatgcctgtaactgactggcagcatcatcaaataacttgatagtttccttcgaggtgacttgtccggtgagccagagtcccctggcccgtccaatcaaaaacctcgcttccgggatattcgcggtttccaatcggctcataaaagcaatcagactttcactttcggtcttaggcgcttcccgttcagcggttgaattcgttcgggtcaacggggtaatctgccattcaataagacgattaatttcgttttgtgttataccggcttttaaaccgacaacacgtccggttccatcaaagatgacgcgttgcgtaagatgttcaacatgttgaggtgccaccgcgatcccaaagaccccagcggattcagctcgctgagccctgaagtgctctatcattccggcccatttaaaacgtactaaggtcacctgattgg

SEQ ID NO: 5204 - DNA, 782 bp, Photorhabdus luminescens
aagcttttcttcgatatcttgtttagaaacaccaattttaacgccccctttggcggtaatggtaagcgggctgtttgctgaggtaattaatgccagtggatcactcccccataatctggggtaatatttttgagcgatttcccaagaccaattatcgttcgacaatggcgtaatagttgtgtcgtgatgagctaatgctagccgggttacactctgaatacctttaatcgctaataatcgattaaccagatggctgagatttaataccgtatcgccggtgtaatctttggtttgaggtaaggtcggtatccaaccgtgatgtaaataagggccggcaaatatctcttcatgatggtaaccctgatctttcatggcctgagtggtataacgttcgggcttgggcagtaccatctgttccgccgtcatgtaaacctgagcgaagatatcaggaagatcaatgacgttatcttcaagttcaatatcaatctgcaaggggagatcggcaggttgcagccagataattttgctgacggattcccccagattacggttatcttttaggaaagttttcagactctcctcagccagtgttgtattagtttcagtttcccggctaggaagtaaatagagccaataatttcctcttagtgctaattggctatctgagccggagtttttaaagctgtattcacgtttctgtttgttataccaatactgataacgttgattttcaaggtcacgaattaattggacatcattaaagaaaaaataccttccgcggt

SEQ ID NO: 5205 - DNA, 683 bp, Photorhabdus luminescens
tgtgattcaagctaccgagcagcaattaaaatcgcccccggctactgcggttaacgtcacggatatgctctccctgccgttgatcgccttaggtgccggcgcttctttggcggggggtattgattatctctcgctggcttggcaaaacggcctggataatcttgatgactttacccccggacaaatgttgcaagcacaggggaaagcatgaagataccgacgataacgatcaaaatagacggcaaagtcctcaatcaatttacggttatcactctgaccgttaaccatcatattaatggcatcccctcggccaatatcaccttgggtatcgccggtgatgcccgccatatttttgatgccaaggcacaagctgaactggcaagttgccgccctaatcatcaacttagcgtgcaaatcgaaaaagccggggtgtttaaggggatcatcgttcggcaaacattggggcttaaaggtcaggacaggatcattactctgaccgcccaacatgcgttgcaaaattaactcacaactttcactcccaactgttcacataaagagtggtgaggcgattattaagaagttggttaagcacaccggtatccctggccgataaaaccagccccttcacttaaaacgtgaataaaccaaggggccatttcctgttatgaccggacgttctaaaa

SEQ ID NO: 5206 - DNA, 766 bp, Photorhabdus luminescens
aagcttgaaaactccaaagcacaggatattgtttcccttgatgtccaagggaaatcaagtattaccgattgcatgatcgtctgtaccggaacttccagccgccatctgatgtctgtcgcagataatctggttgatgactgtcgtgcgagcggcctgatcccactcggcgttgaaggacaaggcgtatctgactggattgtcgtagacctcggtgaagttatcgtacatgtcatgcaagaagagagccgccgcatgtacgaactcgaaaagctctggagctgagtttgaagctgcaattaatcgctgtaggtacaaaaatgccggactggatacaggccggctttacagattatttgcgtcgttttcccaaagacatgccatttgatctgatagaaattccggccggcaaacggggcaaaaatgcggatattaaacgcattctggaaaaagaaggcgaacaaatgctggccgctgtcagcaaaggcagccgtattgtcaccctggacattccgggttcccgttgggaaacgcctcaattggcgcaacagcttgaacattggaaacgggatggtagagatgtcagtttgttgataggtggacccgaaggtctcgctccggcatgtaaagctgccgcagagcaaagctggtcactgtcaccgctgaccttaccccatcctctggtccgagttttagttgcggaaagcctgtaccgggcatggagtattacgaccaatcattcctatcatcgggaataatttggttatca

SEQ ID NO: 5207 - DNA, 675 bp, Photorhabdus luminescens
cacgcacacgaagcataccaatggcatcatcaagtgaatcacggtaaagcacgatccggccatgaggagaatgagttaattgccgaatgatggatttccagtcatcattaatatcaatgccaacaatttcattacggggaaccataatgtcgccgattgtgactttttccagatctaaaattgaaatcagcatatcctgatgttgctgtgatagcttggcatttgattcatgcacaatagtgcgaagttcatctttactcattgcgtgactggagccagtaggttgtttgataccaaggcaacgcattaacaataaagtaattttatttagcacccagactaacggcagcatgattttctgtaacgggcggagcaaaaaactactcggaaaagcgactttttcaggatagagggcggctatcgtttttggcataacttcagaaaatatcagcacaataaaggtcagaataccggttgcgatagcaactccggcatcgccataaagacgcataccaataataatcgcgagtgctgaggcaagaatattaaccagattgttaccgataagaatcaggctgatgagctgctcatgatgacaaagtaatgcttcaactctgcgggcagagtgattcccttgctttgccagatgacgtaagcgataaccattcattgtct

SEQ ID NO: 5208 - DNA, 876 bp, Photorhabdus luminescens
  misc_feature (621)..(621): n is a, c, g, or t
  misc_feature (629)..(629): n is a, c, g, or t
  misc_feature (637)..(637): n is a, c, g, or t
  misc_feature (641)..(641): n is a, c, g, or t
  misc_feature (716)..(716): n is a, c, g, or t
  misc_feature (761)..(761): n is a, c, g, or t
  misc_feature (796)..(796): n is a, c, g, or t
  misc_feature (798)..(798): n is a, c, g, or t
  misc_feature (815)..(815): n is a, c, g, or t
aagcttctatattggaaattaaccatcggcggatgccggcaattcgtgacgctgatggtgtattggcaattggatttaacgtcttatgtgaagatgcgcgtagtcagatggattacattgttttatcaaaacgttatcacacggttttgttataccaggttccagcgataatgccgggtaatgaaaatgctgctcgtcgtttcttggcattggttgatgaattttatgaacgccgggtaaaattgataattaatgcggcggtgccgatggagcagatttaccaaggggtgttgttggttttcgaataccagcgttgcttatcccgtttgcaagagatgcaaagtgaagagtatctcaaattacctcatttaccttaagtttgagttcgcttatctatttcagacggaaaactgattttaaatattcaaatgggggtcgatttttatttttgacttctctataatcttgcgaccccacgttacagcaatgtttttttcccaaaaacttgcatatagtgccggcataggctattcgaaggggtaggtttgctggacaagagtcgtgtgaacctcggcaagtttctgaaccttgagtgttcaccaacgtgtaacttattattgngtaagctntaatgaanactnttacagctaagccagaaaccgtaaaacgcgactgggtatgttgtgacgcagatggcaaaactttaggccgtcttngcactgaagtgggctcgcgtctggcgcggaagcataaagcggaantacactcgatggtgtccgtagtctatatcgtatgnanaagtgcagacggacagntctgtaattcttacaacgctatgggtacacactagaaatgccgctacgatatcgagttaag

SEQ ID NO: 5209 - DNA, 713 bp, Photorhabdus luminescens
atttagtgaatcgtgaagaatttgatatccaaactcaggttctgttatgtactcgtgaaaaattgaccgcgatggaacagcgtttaagtgaactagaagcgaagtttgagaataagaatgttccatctgctgataacacgacaaaaaaagaagagtaattattaccatacataaaaataaccgtgataatgagcagaatgtgatatctgctcattacacatccacaccaatcagagattaatgcttctggttttctttaccgtaatgctcagaacgtggaccatacagcaaactacgactaccaccggctgtcagtaagcggttacttgtaatgccagcgatttcatgacctttatccataatggtattagctatctgtgaaactacggcggataccaacatgccaacaagattattcgaattgctttgattttcagttgatgaaaccattgctcgaccatgccacagttgtttaccactacgcaaatccaccagcttcgcggaagccgttacacgcgtatcactggtgataatctgatattgcgtaccatattcttcaatatccaactagagcgctgaatctgcaccaacaatatcatgcacttctttgtcactgatatcctgaacatactgtgccggtgtcacaccactttgctgaattgtctcttcacagccgcaccggacatactatacccgatctcgcatggtattat

SEQ ID NO: 5210 - DNA, 770 bp, Photorhabdus luminescens
  misc_feature (770)..(770): n is a, c, g, or t
atcacctagtagagtgatgcggtgatattcaccgccgtggacaaaatcgaagtccaatagataatcagtatcaacaccgtgtgtacgaacacacagaaccggttcgtacatttggcgctcacgattttcatggaggcgataactgtagctgctgccgttttgttcactgtcattcaaacgggtgaccagcatttcaatccattcttcaactttcgccttatcagacaatgtttcttcggtcagattcggatgataaattaggctattcaataaacttagcggatacaaacgttccatgcgtttaatgattttttgaacaccattaaattcggtcactaatttttctagcggttcgcctctcagggctggtacgtgctcattggtgtaaagtgaggcaccatctagtgcaatggatagttggtactcatccattgcttcatcatctttaatatattgttcttgtttgccttttttgactttatacagtggcggctgagcaataaacacatgaccacgttcaatgatttctggcatttgacgatagaagaaagtcagcaagagagtacgaatatgagaaccatcgacatccgcatccgtcatgataataatgctgtgataacgcagcttatctgggttatattcgtcacggccaataccgcagcccaatgcggtgatcagggttgccacttcctgagaagagagcattttatcgaaacgcgctttttcgacattcaggattttgccttttagcgggcaaattgcctgatttn

SEQ ID NO: 5211 - DNA, 688 bp, Photorhabdus luminescens
tcaggtggcctgttctgagtggaacgatatccgtgacgagatcggtcataacgttggtgtttatgataacccggcggacttaaccgctaaatcatggaccgtgatgcgcttctcagaagttgaagagaacggcaaactggaatggctgattcgtaaagatggttgtatgcactgcgctgatccgggctgcttgaaagcttgtccagccgaaggggcgattatccagtatgcaaatgggattgttgattttcagtctgaacactgtatcggctgtggctactgtatcgcgggttgtccgttcaatgtgccacggatcaacaaagaagataaccgggtatataagtgcactctgtgtgttgaccgcgttaacgtcggtcaggaacctgcctgtgtgaaaacctgtccgaccggtgcaatccattttggcagtaaaaaagcgatgaaagatttggcggctgaacgggtgagtgatttgaaaggccgaggttttgagaacgcggtcctgtaccatcctgatgggggtggtgggacccatgtgattgtatgtgctacaccatgcttaccaaccacagctatattatgggcttaccggacaattccgctatcagcccgacccgtacctgatggaaaggtatctggaaaccgctggacgcagtgtgatttggttgcacattcgctcgctccctct

SEQ ID NO: 5212 - DNA, 781 bp, Photorhabdus luminescens
  misc_feature (768)..(768): n is a, c, g, or t
  misc_feature (781)..(781): n is a, c, g, or t
tccaggcaccttcaaaaccggcaatgcaagctccaattacctcatcacgtacaaactggttcaggcagagtgctgctagagttgtggcaaagggcaatgaatagactgtgatacgttgaatagaaaaatcaaccgctgctcggtaagcggcataagcacgaaacaggtcacgccaaggagaatgaccaaccatttcatatacatgtgaaacttcatcgttaggaacatacgagaagtcgtaagctgtatcgaacagcactcgtaaccagagcaccaattgatggagatcctcagcttgccaacgggcaccatcagtacgctgcatgcgcaagaaaagcgtccaagttcctaactgacagactcgattcggtgatactcgccatatgggtttccattcgacaatacgcaatgccaacgcttcgaatacatgtaaacggccaatgtcctcttccggagcgttcggtagttcggcaaattcaacgatcaattccttctcattaaagaggaagctggccttatgtactacaaaggggagtgaaatctctagaatgttccgtgttaacctcagcaggcaagagcgtgcatcaccaaaaccatctgcgatatttatcagtttgcgtaggggagcaggcagttcagaaccggagtgagctcgaaagtgagccaacatccactgatgtaaaagattatgtagttgatgagcattttccataggcagttgatcaggcatcatattgccagcaatgggtattaaacttgccagcgcangatgtcgtcgccn

SEQ ID NO: 5213 - DNA, 693 bp, Photorhabdus luminescens
  misc_feature (595)..(595): n is a, c, g, or t
  misc_feature (686)..(686): n is a, c, g, or t
tggcagtatgaattgggtgattacgccaccacgtttattcagaccggtacttggaatgaccattaccgtggtttgcaagtgggagaaactctgcaactcaatttgctccaaatggaagcggcatatttagttcgtcatgagcgccgtcttaatgtgatccgtactgtgtcgctcaaaagcctattgggtgatgatggctttggtaagttaaaaactgagggcaaagttgactttccattaagcgaaaagctgtttgacaacgactatccggggcattatttgcgccagattaaaaccgtgtcagtgacactgccgacgttgatcgggccgtatcaaaacgtgaaggcaacgctcacccagaccagcagtagtacgctgctcacagcagatatcaatggtgttaaacgtctcaatgatccgacaggtaaagagggggatgcgacgcatattgtcaccaatctgcgggccagccagcaggtggcgctctcttctggcattaatgatgccggtagctttgagctgcgtttggaagatgagcgctatctatcgtttgagggcacgggtgctgtctccaaatggacgcttaccttcccgngttcggtggatgatcatattgacgattaaacattgtaagccgctgagatgcaggccgcactgttggcaatatggatgatgtacctgcgccngcgctta

SEQ ID NO: 5214 - DNA, 785 bp, Photorhabdus luminescens
  misc_feature (758)..(758): n is a, c, g, or t
aagctttttagcaacatgttttggccaacagtgtgacgatgtagcagaagaaatgttaaacaagtttttaattcttcatgcagaacatgggctgaactgctcaactgcaaccgttagagctgtagcgagttccggtgcagatccatttaatgctgtagctgcgggtatttgcgcattcagcggtcctcttcatggcggagcgagtggggcagttggtttaatgatcgatgatatacacgacaattctaaaaatattagtacttttattgatgaactagtagaaagaaagcaacgtcttatgggatttggtcatcgaatttacaaacaaccagacccacgagcttcttacatgagcgatattcttatcaaacagaaggcaaaattcgatgttatttcttcctatgtaaatatttcacaggaacttgcatcggaagtatcgaaaaggccgtatttttcgcaacggggattatacccaaatccggatctatttaatgggttgctacttcgtagagctggtttcaagtcgcacatgaatactgctctcctttgctttagtcgtgctgctggttggttggctcattactatgacagtattgacagtaaagcgccaattctgcgaccacaggagctatatttatgaaaaaaaagcataaaccagtacggaaactaatcgtatttggatgtggtcctcactttttaaatagatatttagatgttctattggagtaccgcgataccattgagggtatgcttatagntgacttgaaatgccgagaaatgaaaat

SEQ ID NO: 5215 - DNA, 687 bp, Photorhabdus luminescens
agcgaactgttaccggcgacagcctttgtcgaacacaccccgacaggtatgtatcgcgtgggcaagggcatttcctactctgaaacggccgcgggcggatcgagcagtcacggtcagtcccgggcacaactgattgcggcagcaggtacacagtccttgctgaccgatattccaatcgagaagaccctgacgcataccttgcagacacgcgggtacgatgtacacaacccggcgttgctctcacaagcactacgggatagcgagctcaaggggacgctggcaccaatgagtggcgattctgagcctcgtcaggtcagtgccaatatccatcagttcgccgccgatcctgtgttgttcgccaaatccaacactatcaataccgagacattaatcaggtcggggagtttcccagcagaagggaacgcccagctagtgaaaatcgaatcaggcttgtacgagctcgaatacactgatcgaagcgctaatgatgatgtagcaacaggcgcttacagcatacccgcgtattttctcgactacgacagcgccgatcatgccaatgcgtcaccaggctacgtagattttcccaagcctgcgaccgctgagagttttctatttaccgggaccctatcgggtggctcggtggtagtgaccacccctcatgccaaaactaccggtctaccacgatgg

SEQ ID NO: 5216 - DNA, 780 bp, Photorhabdus luminescens
  misc_feature (731)..(731): n is a, c, g, or t
  misc_feature (738)..(738): n is a, c, g, or t
cctgagcttgctggaattttttcaatcgaaactaacaaactctttggcgaattactcacggagaacgatgaagccgcagagctcgttaattctcttttgtatgaactaagcttaatgaaagtaaaaatggaggatatatgagcacagcagtacaaaaagtttatgaaatcatcaacccgctcaagactgaatttgagcaaatttgtagtgagccgggcatagtatttaaacgtgagtctgaatttgctatgcagatattcgcaaataatgattttttagccacaactgcattaaataatccggtttcagcgcgtagcgcagtaatgaacattgcagcaattggcattagtctaaaccctgcgcaaaagctggcttatctagtgccacgaaacaaaagcgtgtgtcttgatatcagttacatgggtttgatgcacatcgctcaacaatcgggtgctattaagtggtgtcaatccgctgttgttcgaaaaaatgacatattcaagcgcacatctattgatactgcgccaattcacgaatacaacgaattcgacacagcgcaatcgaggggggacattgtcggcgcgtatacagtaatcaaaacggatgactgtgattacattactcacacaatgagagcatcagctatatttgatatcagagatagatcatcggcatggatagcatataaaacaaaagggaaatcgtgtccgtgggtcacggacgaggaacanatgattntaaaaaccgtactcaagcaagcggctaagtattggtctcgca

SEQ ID NO: 5217 - DNA, 698 bp, Photorhabdus luminescens
tacaggatgcgcattgtcgtcaagttcccatttatgctgaatgcggtggcctgatgtaccttgggaaatcgttgaccgatggagaaggggcgagtcaccagatggccggtattctgccgggggaaagccatatgggtacgcggttgatgcgctttggttactgtcaggcacaggcccgttttgacactttgctggccgcagaaggtgagattttacggggccacgagtttcattattctgattttatcagctcagtgccttcagtctttgactgtactaaatggcgtgacgggatggcaatacagcaatgggccggaggctatcaggtacagcagacactggctagttatcttcatatccattttgctcagcgtcctagtctgcttgatcgctggttgaggtctgcgaggaggttattgtgacacttgctgcctggtttgctgctttcttgctcgatagctggttaggtgatccgccgcattggcctcatccggtgccgtggattggtaagctgatctctttggtacagcgggcagttcggcgctgttgtcacagtgaacgagcattgaaagtcggtggagcagggctatggatagtgcgtgttgggctgacttggttggtgagttggggatgcttgtggctgatgaacgccattctccttgggtcggctgctggtcaagtgtgatgattataccctg

SEQ ID NO: 5218 - DNA, 771 bp, Photorhabdus luminescens
  misc_feature (695)..(695): n is a, c, g, or t
catcgttgttcatccttcttactatatttgaatgcgttaaattataagtaaaacacagtaaaagaccatctcgcctgatattccaatggaatacaggcgaggctaacgggatctatctggacccccatacatacaggtaagaggtgaaactatgacggtgcttgcttaaaataaataatgattaaagaatacaaagacaatactgcaccaactgcatagcaggtgcagtatctctctaatttatccctacaccgccgggaaaacgggtaacagcaaatagagtttaatcacaatcgcgttaacgatatcgataaagaatgccccaaccatcggcaccaccagaaacgccacatgggatggcccgaagcgatcagtaatcgcctgcatgttcgcaatggcggtaggtgtcgcccctaaaccaaaaccacagtgacctgccgccaaaaccgcagcatcatagtttttacccatcactcgataggtgacaaaaattgcatacagcgccatcacgatggcctggatggtgagaataaccagcatgggtaatgccagcgatgccatctgccacaatttcaggctcattaacgccattgccaggaacagggaaagacttacgttgcccagtacagaaactgctcggtcaaagactcggtaaaaacctaacaccgatagactgttactgagaataaccccgnataataacacacagacgaacgtcggtaattcaaaccatgtaccttgcagaagttcagatacaaaattaccctgcct

SEQ ID NO: 5219 - DNA, 695 bp, Photorhabdus luminescens
  misc_feature (687)..(687): n is a, c, g, or t
  misc_feature (692)..(692): n is a, c, g, or t
ttgcgaaaagcatgccaactttttaacgccttgcaatatactgtatcgtgggtataccggtgatgggatatctgaatatttgggaaaattgcactatattggtgcaattgtattactgaggcgcacaatattagtgcgtttatgtcaaaaatgcgtctatttatgggtgtgaaagggatcacaatttcattgttatcaagttgttaagcgtagattattgtgatcctgtttagtccttcgaccaatgtgtgtacaatagcgcgccatttctataaatgcctgaggcaaagtttgtgatcgaaaaattgcgtaatatcgccattatcgcgcacgttgaccacggtaaaacgaccctggttgacaagctgctgcaacaatccggtactttcggtgaccgtgcgacaacgacagagcgtgtgatggactccaatgatctggagaaagagcgtggaattactattctcgcaaaaaataccgccattaaatggaatgactaccgtattaatatcgtagacactccgggacatgccgatttcggcggtgaagtagaacgtgttatgtctatggtcgacagcgtactcttgctggtcgatgctatggacgggccaatgcctcagacccgttttgtgacacagaaagcgttcgctcatggtttgaaaccgattgtggtcattaacaaagtgacgnctgcnccg

SEQ ID NO: 5220 - DNA, 808 bp, Photorhabdus luminescens
  misc_feature (706)..(706): n is a, c, g, or t
  misc_feature (761)..(761): n is a, c, g, or t
ccttacagctacgtactttcgagccggaagggcaaaaggttaaaactgaccggagggaagataataccggtatctatcgtcacttgttgacgggtgtttcttacatgttaccgatggtggtggcgggtggcctgtgcattgcattgtcatttgcttttggcatcactgcatttaaagaatcgggtacattggcggcggcgttaatgcaaatcggtggtagctcagcttttgcgctgatggtccctgtactggcaggttacattgctttctcgatcgctgatcgcccaggtctgacacccggtttaattggcggcatgctggcaactagcacgaacgcgggatttattggcggtattattgcgggtttcctcgccggttacgtagcgaagttgcttaacagcaaagtgaaattgccgcaaagtatggccgcattgaaaccgatcttgatcattccgctatttactagcctgatcactggcctgattatgatttacgttattggtaaacccgtcgccggtattatggcggggctaacgtattggctttctcacatggggacaaccaacgcactcctgctaggagccattttgggcgggatgatgtgtgctgatatggggggagcgataaacaaagctgcctatgcgtttggtgtcggcttgcttagctcacaaacctacgcgccaatggcggccattatggctgcggngatggttcccccgctggctatgggagtggcaacactgattgcccggcagaagttngataacgttcagctggaaagtggtaaagccgcattggtgttaggact

SEQ ID NO: 5221 - DNA, 719 bp, Photorhabdus luminescens
ttattgggtatttctggatcacctcctccaacgcatccaaatcaataccgttttgtggatcagttttgatggctaccgctttcagacgtaaacgttcaatggcctgtaaagcaccgtaaaaagccggtgattcaatcaccacccaatcccccggttctgtcaccgactgtaaactgaaactcagtgattccatcgcacccgcagtgatgacaatttcatcaggagggacatgaataccatgcattgcataacggcgcgatatgttacggcgtaacttatcattacccggcggtaaattagctaaagcgctatgtggtgctattcgtctggcagcagccgctaacgctttggaaagtttaggttgaatcaataaggatggatctggaaatgctaaaccaaacggaataatcgcaggatctttgcacgcctgtaatacatcaaaaatagaagcgcttatttccacgctttcacttaaatgtaatcgctttcccccttttgctgcggcaaagggctgcaaacgtttagcgacgtaataacccgattgaggccgggaaatgatccatccctgactttctagtaattgatacattgacaccggcataaactcacactgatacttactgatccctcatgaaggaatcatctccaccgcaggacatcttaatatgtgaaaattgctgcaattgtatacgctatcatcaaccttcgaactgatagca

SEQ ID NO: 5222 - DNA, 785 bp, Photorhabdus luminescens
  misc_feature (734)..(734): n is a, c, g, or t
ccttattttcagtgggttaacacaatgataagtaatgtaaaaaattcgatacgcggaacatatcattcgattagcaaaaagtatttacctcgttatcttgccgaattctgtttcaagttcaattggcgctttaaccttaaaaaaacattcgaacagcttatttattcatgtatccgggcagcacctatacctgagtatttactcaagctagctgagattcgatggtaatcaggtaaaagaatgctcaccagatggaaatccaaaataactaaacagccttctgcatccatatgggctctaaaaatggttctcaccttcctaccccttgtatgcaaccgccttcaaactctacctctcaatgagccgtagccgtaacagaagcgattacacatgaagtgtgcctaaatgatttggcagtatcagacccctgaccagaaaacatgcctagatgaacgtaatgttccggtgaactcaccttgcgtggtcagataaccacaaaatgggatgttaacggaagggattctcaggccagggcaacagctcattcaaccgattgttcggccagacaggcagccggctgaggacatcacgtaaccagacccagggctcatgtccgttggctttggccgtttccagcaggctcattatcatggccgcccgttgccccgcggccagtgaacccgcaaaagccagttctttcggccgagcgccacaccccggaccgcattctccgnccggttgttgtctatcggcaccccccgtcatccagattacacaccagcgca

SEQ ID NO: 5223 - DNA, 694 bp, Photorhabdus luminescens
  misc_feature (664)..(664): n is a, c, g, or t
cgcaacttgatcgaagaagacgcgtacatcgaacgtggtgaacgacgccaaccggttagcagttttgaacaagcgctaaactggttgactaaagagtctcgccgtgggttgtctatacagcgttataaaggtttgggagaaatgaaccctgaacagttatgggaaacaaccatgaacccggaaactcgccgcatgatgcgtgtgacagtaaaagatgccattgcaactgaccaactgtttacaactctgatgggtgatgctgttgaacctcgtcgagcatttattgaagagaatgccctgaaagcagctaatattgatatctagttgatattattataaatttaaaaaagcgctcatattgattctctatgagcgctttttttatctgttatttataaccaataaagtgtaatttatttaatgtttctgtaaaacatcacttaaatataatctaagggtataatatggctgacatgatttacatgacaataaagggaaaaaaacaaggattaatatcggctggatgttcttctgttgattccattggtaataaatatcaagcaaaccactttgatcagatattagtttatagcttaagccatgcgataacacggactcaaaatgtcgatcatcaacccattattatccaaaaacctatcgacanatcatcaccattactcgggggttgctattt

SEQ ID NO: 5224 - DNA, 770 bp, Photorhabdus luminescens
  misc_feature (205)..(205): n is a, c, g, or t
  misc_feature (227)..(227): n is a, c, g, or t
  misc_feature (262)..(262): n is a, c, g, or t
  misc_feature (267)..(267): n is a, c, g, or t
  misc_feature (269)..(269): n is a, c, g, or t
  misc_feature (280)..(280): n is a, c, g, or t
tatccgctgacaaaataccccatgcaccacaaattaaatctatagaaggatcacaaaaaagcccaatacccaccgaattctttgagctaatttctgacagacaataccctatctctttcaccctcaaatagaaatcagcgtaactgagagattcttcttgatcaataacaacatatccatctgcctggtgcttaagttgactctnaagcatatccatcaatgttatngcttcttctttaagataaacatcattgattgagtnacatngngtaatattatnttctaacatttcccatgactctatatactaataaaatgaatatctcacgcagttcaaaatgacattttatgtactgaatcataagtgcctttctgctcaccgattatgactgatcttttatcgaacccatgcaccgaccggaaattcatcacagacatacctcctccaggcccattactcgcctaaccaatacgactattgattgcctctgcgtaaatcaacatggtgctgtaaactcaacggccatactgcaatacattcacgatgtcctctgtatcacctacatcccccacccatcccttaccatcacccccttatcatattagtgggcgaacctatactccgtcctgtaccagactctatcccccaccatccgttcaccgttacgtccacacggccaacgaccgcgccaatctcctatctatgagtacccccttgctttccgttctatggtccatattatcgatcaccaaccgcagacttagtttcc

SEQ ID NO: 5225 - DNA, 680 bp, Photorhabdus luminescens
  misc_feature (90)..(90): n is a, c, g, or t
  misc_feature (184)..(184): n is a, c, g, or t
atttttctacgctgcgtctggttgttggtggtggtatgccggtacagaaagcggttgctgagaaatgggcaaaagtgacaggcaccaatntgcttgaaggttatggtctgacagaatgttcacctttggtttcctgtaatccttataattcgaaacattacactggcagtattggtttcccggnctcttcaacagaaatcaaacttgtggatgatgatggtaatgaggtagagatgggccatcagggagaattgtggatacggcgcccacaggtgatggccggttattggaatcgtgctgatgcaacacaagaagtgctgaaagatggttgggtagcaacgggtgatattgccaatgttaatgaacagcggctcattcatatgcgctaattgttaaaaatatatgacttctggttcactggtttcaacgcgtatgctaatcaagcgccgacattttattgtacctcactctacaacgttgtgtcccacttcttttctgttcacacgcgatctttcttgcgaacttcgcacacccctttccgatattatccacccccgcttccgctaatgatcatatctcactgcgcctgcccgtcgttgcattccccttccatcacacctttcccccccgttctcgacctatccctccccccaatccctttcttccttgcccctcccatc

SEQ ID NO: 5226 - DNA, 786 bp, Photorhabdus luminescens
  misc_feature (621)..(621): n is a, c, g, or t
  misc_feature (764)..(764): n is a, c, g, or t
  misc_feature (786)..(786): n is a, c, g, or t
attaccaattttctcttgcccaaattgaagaaatcgaagctaccaccgctgaactacatcaaatgtgtttgcaggtagtcgagaaagttgtcgatagtgaagaattgctgactaaatttcagatcccaaaacattgttgggattttgtccgtagttcctggattaccagccagccgtcactctattcccgtttggatttggtttacgacggtaaaagcccggcaaaattgttggaaaataatgctgatacgccaacctcgctgtatgaatccgcttttttccaatggatctggttagaagatcagatgaatgccgggttactgccagcacatgccgatcaattcaacagcatgcaagagcaattgattgaacgctttgctcaattgcgtgatgaacatggctttggcttactgcacatggcttgctgtcaagatacggaagaagatcgtggtaccgttcaatacttgcaagattgtgcgctggaagccggtgttccaaccgagttcttatttattgaagatatcggtctgggagaaaaagggcagtttactgatctaaaagaccaggtgatcagcaatctattcaaactctacccttgggaattgatgttccgtgagattntcgctaccaaattggaagatgctggcgttcgttggttagagcccgcgtggaaaagtattatctccaacaaagcattgctacccatgttgtggaagatgttccaaatcatccaacctgcacctgcttatttgcatgatattatncggcatgatagctatgtataan

SEQ ID NO: 5227 - DNA, 720 bp, Photorhabdus luminescens
  misc_feature (513)..(718): n is a, c, g, or t
taatgaaaacttttacagctaagccagaaaccgtaaaacgcgactggtatgttgttgacgcagatggcaaaactttaggccgtcttgcaactgaagtggctcgccgtctgcgcggcaagcataaagcggaatacactccgcatgttgataccggtgattacatcatcatcgttaatgcagaaaaagttgcagtcaccggcaacaagcgttctgataaaatctactatcaccacaccggtcatatcggtggtattaagcaagcgacctttgaagagatgattgcccgccgtcctgagcgtgtaattgaaatcgcggttaaaggcatgctgccaaaagggccactgggccgtgcaatgtaccgtaaactgaaagtttatgcaggtagcgagcacaaccatgcggcacagcaaccgaagtctggacattaatcggatataggaatggtgaaataatctaggactggcgcaacttcgctgtatacagcgaatataacctatctcactcgtttgaccnnnnnnnnnnnnnnnnnnnnnnnnnnnnnnnnnnnnnnnnnnnnnnnnnnnnnnnnnnnnnnnnnnnnnnnnnnnnnnnnnnnnnnnnnnnnnnnnnnnnnnnnnnnnnnnnnnnnnnnnnnnnnnnnnnnnnnnnnnnnnnnnnnnnnnnnnnnnnnnnnnnnnnnnnnnnnnnnnnnnnnnnnnnnnnnnnnnnnnnnnnnnnntt

SEQ ID NO: 5228 - DNA, 847 bp, Photorhabdus luminescens
  misc_feature (1)..(1): n is a, c, g, or t
  misc_feature (6)..(6): n is a, c, g, or t
  misc_feature (19)..(19): n is a, c, g, or t
  misc_feature (728)..(728): n is a, c, g, or t
  misc_feature (738)..(738): n is a, c, g, or t
nactgncgggcactgcccntggggctctctagagtcactctgcacgcatgcaagctttgctgctcagaggaaatggcgggcgtgaacttattgcccggacgctgacagaaagaggtgccacagttgactattgtgaatgttatttccgccagcccgtagactacccggcagcagaattcagtgcccactggcaaaagtatggagtacaaactttagttgtaaccagtggcgaaatactgcaactgttatataacttaatacccgaaagtgatcgaaacaggtggttattgcattgccgcctgattgtggtaagcgaacgtcttgcacatgccgcccgaaatttgggctggcaggatgttaaagttgcaaaaagtgcagataacgacgccttaattcaggcactagaataaactgacatgggatgcccactatgacggagcaaaaacagtcctccgagacagttgaacaaacaaaaactacggttgaaaactcgcaacagctcgaaaccgcgcctcaaaagcaagaacgttctggcacgctaaaaaacataattgctattgcaatcatgctggcaatcggtggcggtctttattattacggacagcaacaaagccatttactgagtacagagaaccacgagctacgccaacaactggaatcattgaaacaacaacaatcacaggataaacagcatattgaagcgctgtttaaagaacaatcacagactntaagccattnttccgcacaaaatgagcaactgggtcatagtctacaagagttacagggccaaatctctgcgttatccagttctgatgtaaaagctggctactagcacaagctgattttt

SEQ ID NO: 5229 - DNA, 707 bp, Photorhabdus luminescens
  misc_feature (620)..(620): n is a, c, g, or t
aatgtgatcaaattagaacaaaactatcgttcctctggctgtattctgaaagcagctaatattttgatcgccaataaccctcacgtgtttgaaaaacggcttttttctgaactggggtatggtgatccattgaaagtgattacagctaataatgaagagcatgaggcggaaagggttattggggagctgatggcacatcactttatcaataagacccaatataaagattacgctattctctaccgaggaaatcatcaatcccgcgtgtttgaaaagatgctgatgcaaaaccgcattccttaccggatttctggtggtacttctttctttgcccgccctgaaattaaggacttgctagcttatctgcgggtgctgactaatcccgaagatgacagcgcattcctaagaattgtcaatacgccaagacgtgaaattggtgctgctaccattcaaaaactgggtgagtgggcgaatcagcgcaataaaagtctctatcaggctagtttcgatctcggcttggaacaaagtctaactggccgcggtttggcggcattacagcgttttattcactggatggatgagataactcgtcaggttgaacgagatcctttgctagcggngcgtgatctacttcatggtatggattatgaaagctggctgtacgaaacatcaccgagtccgaaagcggctgaaatgccgatgaaaaa

SEQ ID NO: 5230 - DNA, 781 bp, Photorhabdus luminescens
aagctttggaactgcctcgtgaactgtttgaagaacaagctaagcgtcgcgttgttgttggtttgttattaggcgaagttatcagtagtaatgagctgaaagctgatgaagaacgtgttaaagcattaattgaggaaatggcttctgcctatgaagctcctcaagaagtgatcgaattctatggtaaaaaccaagaattgatgaataatgttcgtaatgttgctttagaagaacaagctgttgaagttcttttgggtaaagcaaaagtttctgaaaaagaaacaactttcaatgagttaatgaatcagaatcaaatggcataagttttagttttgtcatgagataatgaatttatcatctcagtgaaatgaacccgcagattaacctgcgggtttttttataaattaagaggcaagatttttcttgaaaaaagtgggtttaccctcagatcctttttaatattatgtatatgattgccaaatttttcagggggaattcccccttgactggctaactttgaatcatggtcatcatcgcttatctcaagtagaattggttatgaatggcaccaacatgaattctattaggagacgaaaatgtcatatagcgacaagcgggatcaatatgcgcctcacatggctttggtgccgatggtagttgaacagactactcgtggagaacgttcatacgatatctattctcgcttattaaaagagcgtattattttcctgaccggtcaggttgaagatcacatggcaaatctggttgcagctcagatgta

SEQ ID NO: 5231 - DNA, 687 bp, Photorhabdus luminescens
  misc_feature (518)..(518): n is a, c, g, or t
gctagaacaaaatcaaattgatacgcaagaattaaaatcgttgatcgctcaacaggcagaacaaggcatcacaccggttcttctggcagcaggaggtcaagcggcggcagtgctatctattcgcgatccactgcgtgaagatactatgactgcattgcagcgattacatcaccaaggctaccgtttagtgatgttaaccggtgataacccagtgactgccaatgcgattgccaaagaagcgggtattgatcaagtgattgcaggtgtattgcctgatggcaaagctgaggtaattcagaaactgcaagcagcaggtcgcaaggttgctatggtgggggatggtattaacgatgctccagccctagcgcaagctgatgtaggcattgcaatgggtggtggtagtgatatcgccattgaaaccgccgcaataacgctgatgcgccatagtttacatggcgtggctgatgcggttgagctatccaaaggcactctgggcaatatgaaacagaacctattangcgcatttatctacacacattggggattccgatcgccgctggcgtgctctatccctttactgaaaccctgttagattccggtagtcgcatgtgcggcaatggcgctctcttaattaccggagtgaataatgcctatccattactgaggttaagcccaaccctgaatact

SEQ ID NO: 5232 - DNA, 801 bp, Photorhabdus luminescens
  misc_feature (651)..(651): n is a, c, g, or t
  misc_feature (769)..(769): n is a, c, g, or t
aagcttgctcgaactcatgtcatccacgctgaaacagcggctgacagcggaacccgtaagattcgtttatcaacgagaaatgccagatgaaatggtagaattactgcgtagcaaacttggcttgtcaaacaatgactcggtgattgctggcggacgctatcacaattttaaagatttcattaaattccccaatgaggggaagagaaacctactcaataaacctttgccaagattacgacacacttggtttgataatttccgcaatggttttgatgcgattcgtgaacaagatgtgctgctctattatccctatcacacctttgaacacgtattggaattattacgtcaggcatctttcgacccgagtgtactctccatcaaaattaatatttatcgagtagcaaaagactcccgcattattgattccatgatccatgctgcccataacggtaaaaaagtgaccgtcgtggttgaattacaggctcgatttgatgaagaagccaatattcattgggccaaacggctcaccgaagcgggtgtacatgttattttctcagcaccgggactaaaaattcacgcaaaactgtttgttatttcccgtctggaaggtgaagaaattgttcgctatgcccatattggtaccggtaattntaatgaaaaaaccgctcgcctctacaccgactactccttgctgaccgaaatcccaaattactaacgaagtgcgccgggtattcaactttattgaaaatccctaccgcccggtcaaatntgaaaacctgatggtttcggcgcatattcccg

SEQ ID NO: 5233 - DNA, 707 bp, Photorhabdus luminescens
atccagaggtgccttattttgcgcaacaacggagagatcaggcagcagttgataatcaagatttacgtgactcgcttttttgctcaattcctctgttttaagttgaatgcggggccagttttttagcgctgagaataaattgtcagccggaagccaaagctcttctgggggtaagagagggcgcattgggtcaattttacggctctcaaagcgttgttggatgtcttgccaaaaacgttcggcggaatggtttatttcttgactgataagcaaagtgttgtcgggtagataatcaaacaatgaaggcaagggttggttaaaaaacaacggttgccagtattctatcccggccggtaacgtgcctttactgacttgctgataaatatgctcattgtcacgacggacttcaaaacgttcccgccactggctgcgaaacagttcaattgtctctttatcggttgggaattcatgagcaggcagtaggttgatttgtttaacttcagtcagcgtgcgttggctgtcaacatcgataatgcgtaagctgctgatttcatcatcgataaaattataccatagggatgctcacttcccatagggaaaagacctaccattgcgccacgagtagcgaattctccggttcaagaacttgtccacactcgatagccggctgttctacttagtccgattttatccgtgagagttctgaa

SEQ ID NO: 5234 - DNA, 793 bp, Photorhabdus luminescens
tcagtcggaacatcccgaagttcatcagcaatatcgggaaataaccttaaatcagagaaagtacgtatatcttgcaatggatcgaaatccaatattttgcgtttttcaagccaaaacggcgatccggtttcaggcgaaaagtgccaattcatgatttgagacaaataaacgtcaaagttatgaaaatcagtcacatgtacctccatattttaagccaaatttacaaggcattactattcagcttaaaaaagataagaaatttaaatgaatcataaaatagttgagaggctctttctttatctgacaagaaagaaaccacacaacaatacaattttaattgttttttcaaagatggccttaaattctcacaataaatttatgattaagaataattattaaagttagaggtaatcaattaatttaaaaaaacattcagtgattgagaaaatattatcatttattaatcatgatgcgcgatttgcaaaagataaatttctttgtcaaaacggtatatggctaggcttggaggtttgaaatcaattgatttatacccaatagatttcaagatgcatcgcgacggcaagggagcgaatccccgggagcataggtaactaacccgaattctgcttaatccgtcattgaaaaatcgtcttctgagtagaaaactttcagtgatggcttcttcaatttaaggcagtaagcaatcaatccacctaaaacgcacatcagaaagccttttatacttcggtggcgggaatgctctatttgagaaagagtttttaattgcccatta

SEQ ID NO: 5235 - DNA, 697 bp, Photorhabdus luminescens
  misc_feature (99)..(100): n is a, c, g, or t
catgtccacgggcatagccataggtggtatttgtataatattttttctggcttaatagtggaatccgttttttgacatcaagccagctatcgggatttnntttctgtgatgccgtcagtttgcgggcatctaacatatgtccataacccatattgtaagctgccagtgcaaaccagatgcgctcatctttagggatattttcaggtagtcgtttcattagattttgcagatagatcgcccctcctttaatactctcctccggatcaaggcgatcaacgacgcctaaccctttagccgtctggttggttaacatcatcaggccacgcacacccgtgggtgagattgcctgtgggtcccaatgagattcttgccaggcaatggcagcgagcagtttccaactgatatcaccggaatatttttcaaatagtggctgataggtaggcagaatattatcgatggcactgagaaaagagagtgtatcgaaataatccaatgatcggacgtgatcaaagtatctctcctccacaccgggcattacattccttcccctctttggctgtaataccccccctcggaacctacaggctttatttcgcacgcgttctcaatacctgttacccggttctatcttactcaatcaacacccctgtcgaactaaggcgacccctctgtgcaactgcaccattcccctcccatc

SEQ ID NO: 5236 - DNA, 780 bp, Photorhabdus luminescens
  misc_feature (734)..(734): n is a, c, g, or t
agggtaaggcgaagcaattaactaacttggcagcagaggaggggttaattgccttgatcgcgggtccagatgtgttgcgctttgcgccagcattaaatattgaatttgctgatattgatgaaggtttggttcgtcttgaaagcgccatcatgcggtttgtcggttaatagtaaattgaaggtgacgttatgatgcttttccgagctgtccggcatagtgacttaaatggggttcagtctttatctcaacgcgctggtataggtttgacatcttttcccaataatctggatcaattacgttcacgcattgcacgtagtgttgatacttttgatggaaaactggccagggctcagcagggattcctttttgtgctggaagataccagcgcgaatcgtgtggcgggtgtcagtgccatcgaagtggcggttggactggaggagccgttttataattttcgggtacaaaaaaccattcgttcatcacgtgaattggggatttataaatctattgaagcgttgactttggagcaagatcagaccggtaacagtgaattgtgtaccttgttccttgatccggaatatcagaagggaagaaatgggacatttctctccaaagcacgttttctttttatcgccgcatttagggatattttttctaaaactatattcgctgaaatgcgaggggtggcagatgagcaaggaaattcccctttctggaattcattgggacaacanttttttggcattccttttttccaggcagattacttaaccggtattg

SEQ ID NO: 5237 - DNA, 691 bp, Photorhabdus luminescens
tttcacccatacccgtcaggataatcacaccgatattgtcatcataacgggcattatccaacgcctgcatcatctctttaaccgtcaatggacggaatgcgttacgtacttgcgggcgattgatggtgattttagccataccatcggtggatttgtgataaaaaatatcttcaaacccttcagagcagtcctgccatacaattggggaataaagttcttcttcgctcgggtaaatcatattcgtattccttattaaagagtgataaaaaatggtttactaccgcggcaaacgccactgcgttcgcccggtgagcattatgcccaacacgtggaatggtttgcagcggcaaagcgcaacgttttgccaaatgttggaatttcttatcattttcgccacacagataaacaaaaggtaacgtcaattgttgcaataccggcactaaccagggttgatgtccaagtgaggtattttccagcatattagccacaccatcgccattattatgacggcgtactttgatcagttgctgacgttgttcaggtaatagatcagaaaaaaccggctgttgataccaatcagataaaacttgctcaatcggctgagaacgaaaacgtccggcccattctctatcgcgttcagacgattattccgctcctgttgggaaaataacccacgatttcctccttcaat

SEQ ID NO: 5238 - DNA, 772 bp, Photorhabdus luminescens
  misc_feature (604)..(604): n is a, c, g, or t
attaccgcaatcatggcttacaccctgcaaatgataggcttccacaggttccctttctattaacatagcgattgcatcagtaagttgaatttcatcaccggcaccgggcgctgtttttgctaataacggccaaattttctcggacaatacgtaacggccaacaatagaaagatttgatggtgcttctttcggtttaggtttttcaaccacgcgcttaatgagtttgctgtcaccgggttgaagattttccccctgacaatcgacaataccataactagaaacttcttcatgaggtacaggttctactaatatttgactcgcgcccgtttcattataccgaaccaacatttcgcttagattatatctggtcagatctgtactgtattcatcaagaataacatcaggcagtatcacagcaaaaggttcatcaccgattaaaggcttggcacataacaccgcatgccctaatcctttagcaattccctgacgagtttgcatgatggtgacatgacttggacaaatagattgaacttcgtccaataattgacgcttcacccttttctcaaggatagcttctaactcaaaactggtatcaaaatggttntcaattgaattttttgatgaatgagtcaccaagataatttcattaatcccagcggcaatacattcattaacaacatactgaataagaggtttatctactaaaggcaacatctctttaggaattgccttcgtagcaggcaacatccttgttcccaagcccgaacggaaa

SEQ ID NO: 5239 - DNA, 683 bp, Photorhabdus luminescens
  misc_feature (87)..(87): n is a, c, g, or t
tactgatgaaaatacaggcgaaaaaacagtaggttaaccgtttttagtattgcggccataatcttagtttatgcgaaaaatcgtttnagctaattctgaaaaataatgaggaaatatcaatggaactggatgatctgttatctgtaatgacaccagaaatatatcaacgcttggttcaggcagtagaactgggtaaatggcaggatggtgtgcctctaacggtcgagcagaaagagaatagtttacaaatgattatgctatggcaatcaaggcataaccatgatccgcaacatatgacgattggtactgatggtcagttggtgatgaagagtaaacaagaactgaaagcgatctttcggtctaaaatggtggcaacattcaagccataatctttggcaaattaggtatgaaaaggctgagtgtgtaaaactcagcctcgccttggattgatatcagagaagagcatcttctagttgagcaagttctatcaatatagcgccttgctcttttagctcttttaaggctgattggctatcatttggactcaggttaacccctcgacagccatccgtaatgacccaggtttcataacctaatgccagcgcatccagcgcggaaatttcacacaatagtcagtggcgataccaatataaacagacgttcaatttgctgggtttgcaccc

SEQ ID NO: 5240 - DNA, 785 bp, Photorhabdus luminescens
tgacagaagagcaggaaccgacaaaacaggagctgtttcaggctttgccggtatctcaacaaacacaagttgctgacaactattcccgggagaaaagagaatacgaagcggttgtaacaaatctgaaagcagagatgaacgtcaatctctcttctcaacaatcacgaaaaagcgatatcaatgcgctcactaagctccgacaaaatatcagccagcgtttaaaagcacgtcaaaccttaagtcaaaaacaagtgatcagtaaagttgaatatcttgaacaggaaaaagagtttctggaaacagaacgcctgattgcccaacaaaatgcggagtttcatgttctgcaatcgcaatatattagcctggaagagcgcttaaacagcctgaaaacacaaaaagagcgcgaatggtttgataaaagaaaacaggccgaagttcaattggtcgttttagagcaagagctggcaaaagctcaggtacgggaacaacttgaagtcattcgctcccccgtcacaggaacagttcaacaactcagcgtccatacattaggcgcggtactgcaaccagcacaaaacttgatggtgatcgtccctgatgacaatgtgcagttggcggaagtgcaaattttaaacaaagacgccgggtttggttattcggggcaacaagtcaccattaaggtcgatgctttcccttatacacgttatggcacgattgacggcgaactgttgagtatatccagagattcaaccaccgatgaacagctaggattggtctttcctgctcaa

SEQ ID NO: 5241 - DNA, 698 bp, Photorhabdus luminescens
  misc_feature (684)..(684): n is a, c, g, or t
tctgcgcgctaaaattgatatggcatccccttttattgtgatgcgtgatccggttttgtaccggattaaatttgcagagcatcatcagtgtggtaacaaatggtgcatctacccaatgtacgattttactcactgtatttctgatgcgcttgaaggtattacacattcgctgtgtacgctggagttccaggataaccgccgcctgtacgactgggtgctggaaaatatcaccattgattgtcgtccacgccaatatgaattctcgcgtttgaaccttgaatatacggttatgtctaagcgtaagctgaatctgctggtggcagataagattgttgaaggttgggatgacccacgtatgccaacgatctcaggcttgcgtcgtcgtggttatactgccgcgtctattcgtgaattctgtcgtcgtattggtgtcaccaagcaggataataatgtggaaatggcagcattggaatcttgtatccgtgatgatctgaacgaaaatgcgcctcgcgcaatggctgttcttgatccggtcagattagtgatcgaaaacatgccagaaggggagcagattttgagtatgcctaatcatccgaacacaccggagatgggcagccgtgaagtgccatttattcgtgagatctatattgaccgagcagatttccgtgaagaggcgaatccctnatataagcgtctgg

SEQ ID NO: 5242 - DNA, 775 bp, Photorhabdus luminescens
atcgctatattgaaaatattcgccgttatcagcttagtttagtcggatatttacaggccaaagaaaatcggaaaaaattaattccccaagaaaaccaaccaaaataaagtaaacaaatataaggctctaaggagtcaattacagccattatatatcctcagttatattatgtttgacaactaattcagctaaccatactaaattcatcgggacactatctctctcaaaggataaatcatgattaatttagacattaacgaacaaaacaaaattatggtcgtcagcagccatgtatttagaccgacgacggcgaatggtcgagcctttaccgagttaatagaagcattaaaaaagaacaatttcgctgttatcctggcggctacattccaagatggcatagctaccgtttcttctgattcctcactatgctgtatttttgttgattggacttcaggagataataactatgaatctcataaacaagtgttagaattactgaaagagatacgcaaacacaatacaaccattccggtattgttgaccgcggaatattccagcatcgacacactgacacttgaagtcatgggattggcagatgaatttgtctggatgcttgaagacacggctggatttatcgcctctcgcgccagttcgctaattaagaaatattatgcgcaattattaccgcctttcactcgtgcattactgcaatacactcaagaatcaccagaatattcctggactgctcctggacatcaaggcggtgttgcactga

SEQ ID NO: 5243 - DNA, 692 bp, Photorhabdus luminescens
gcggagataatctggtttccggcatgctcgggggagccaacattatcacgcatatttcgggtgataatgaaatatcagataccacagcaattgcgctgggcggtgccaatatcctgaccaaaaagggaagaggtgatgctgttgcgctgatgggcggtggtgcaaatgttctgactcacattggttatggaagcacgacgggggtgatgttgggtggtgccaatatcctgaccaaagtaggcaacggtgatactaccggcattatgcttgggattggtaatgtgctgactcatgtaggagatgatcagacattaggggtcatgggagcagcaggtaacatctttactaaagtgggagatggaactgcaattgcggccatgattggtgctggcaatatctttacccatgttggcaagggtgatgcatgggcgttgatggggggtctgggcaatatctttaccaaagtaggggatggtaaggcgctggcattgatgatagccgctggcaatgtgtttactcacgttgggaatgggatgagcgttgctttgatgttggctaaaggcaatatcgctaccaaagtgggtgatgggacgaccttggcagcaatgatcggtgaggccaatgtaatgacccatgtcggtaatggctcaacctttgccgcgatgatcgggcagggcaatatcctgacaaag

SEQ ID NO: 5244 - DNA, 776 bp, Photorhabdus luminescens
  misc_feature (659)..(659): n is a, c, g, or t
  misc_feature (740)..(740): n is a, c, g, or t
taacttcgatatattttaacattttaaacatccagagttcacggctctgggtgttttaattggttgagaaaataaatttaaaaattataaattaatatcttaactggaatatagttcaattattttaagataaattcccatcgaaataatttagccctgtcatttattttcacattaattatcacaagcctaatcttcaatcaaaaaacatgattgaatattttttcattattgctaaagtatttataggaaaaaattattaagcaaaattaaatttaattgccattcatttaaaaggactcatatatggatatgaagaaaatgctaaatagcgcagattattctgatacaaaaaacgctaataaagagctggttaatggttcatttaacgaaggatatcgtggctggagaatcccaacccctgaaactgtagaaatcctgtccgagaatggcgttaattttcttagcatccaaacctattccagctctggtgtcattgatcaaataataacagggttggaacctaacgttaaatatcgactgacgggtacagcacgcttatcgactcaactaacaccacaaagggccttgcccgcttattttggcttacagaatcgcacatttggccctgaatcctttgttgtcaatagcttcaattntacgaccggttcagttgaattaaacacagatgaagaaggacttttacgtatttacatgctgaaagacaatttgtagaactncagaagaagaactgctgctttaccggtgtatattaa

SEQ ID NO: 5245 - DNA, 704 bp, Photorhabdus luminescens
ataacctgggtgatgaaacccgtcagaaagttgatctgagcactttctctgatgaagaagttatgcgtttggcagaaaacctgaaaaaaggcatgccaattgcgacaccagtgtttgatggtgcgaaagagaaagaaataaaagagctgctgaaattgggtgacttgccaacttctggtcaaattaccctgtttgatggtcgtaccggtgagcaatttgagcgtcaggttaccgttggctacatgtatatgctgaagctgaaccacttggtggatgacaaaatgcacgctcgttcaacgggttcgtacagtctggttactcagcaaccgttgggtggtaaggcgcagttcggtggtcaacgcttcggtgagatggaagtgtgggcattggaagcatatggtgccgcgtacaccttgcaggaaatgctcaccgtcaagtccgacgatgttaacggccgtaccaagatgtataaaaacatcgtggatggcaaccaccagatggagccaggtatgccggaatccttcaacgtattgttgaaagagatccgctctctgggtatcaacatcgagctggaaggcgaataaatcgtattccggctggtactgccctgaatggatatgacgggcagtttaccccccaccggttgcactcgtgataaaggggagcagcgtggtgtgctgttcttccgacatgactaactccga

SEQ ID NO: 5246 - DNA, 766 bp, Photorhabdus luminescens
  misc_feature (739)..(739): n is a, c, g, or t
ttttcaacgcagaagaattggaagataccgcacggctctatttaaccttattgccacacggcttcacgacattaaatgaagagcaagtccaagaacttgaaactcgttacccaaaaactgagtgaacaaacaaggaattcgtcatggctaaattcgcggcaaacttgagcatgatgttcaatgatgtacctttcacagaacgttttgcccgtgcagccaaagctggatttaaaggcgttgaatatctgtttccttatgaagtcgcagcggaagagcttgctgccctattaaaacagcatcaattaacccaagctctattcaacatgcccgccggagactgggcggcgggagaaagaggaatagcctctatgcctggccgtgaaaaagaatttgccgccggtgtgcaaaccgcgctgaaatatgcactggcgctgaactgcaagcaagttcatgcgatggcaggaaagctgcatgaacacttcacaccagaacaacaacgtgagtgttatatcagaaacattcgatatgccgctgatgtgatggcagaacataacatcaacgtattaattgaaccaattaatacgcgtgatatgccgggttactttctgacaactcagcatcaagctgaaacattactcaaagaaattgaccgtcaaaatgtttttatccagctagatctttatcattgccagattatggaaggggatttgctacgcaccattgaacgtctatgggacanattcagtcacatccagattgcctcggt

SEQ ID NO: 5247 - DNA, 681 bp, Photorhabdus luminescens
  misc_feature (681)..(681): n is a, c, g, or t
tactgatgaaaatacaggcgaaaaaacagtaggttaaccgtttttagtattgcggccataatcttagtttatgcgaaaaatcgtttcagctaattctgaaaaataatgaggaaatatcaatggaactggatgatctgttatctgtaatgacaccagaaatatatcaacgcttggttcaggcagtagaactgggtaaatggcaggatggtgtgcctctaacggtcgagcagaaagagaatagtttacaaatgattatgctatggcaatcaaggcataaccatgatccgcaacatatgacgattggtactgatggtcagttggtgatgaagagtaaacaagaactgaaagcgatctttcggtctaaaatggtggcaacattcaagccataatctttggcaaattaggtatgaaaaggctgagtgtgtaaaactcagcctcgccttggattgatatcagagaagagcatcttctagttgagcaagttctatcaatatagcgccttgctcttttagctcttttaaggctgattggctatcatttggactcagggtaacccctcgacagccattcgtaatgacccaggtttcataacctaatgccagcgcatccagcgcggtaaatttcacacaatagtcagtggcgataccaataataaacagacgttcaatttgctggggttgn

SEQ ID NO: 5248 - DNA, 788 bp, Photorhabdus luminescens
  misc_feature (739)..(739): n is a, c, g, or t
  misc_feature (788)..(788): n is a, c, g, or t
aagcttggcctttcatcgattcggaagagtgggggcaacaattgccttcagggaacttgctacttggtgatggagaaaccatgcgtaaagctgcaatagcaggacttggcttagcacgattagctcgtttccatgtggatgctgatattcggagcggtttgttgctacctgtacttgagaactataatcctggcgataaggaagaaatatatgcagtttttgtcggccaaggtaggcagctcccatcacgggtacgggtatttctggactatctgacagagcgtatccacattggtgatggatggtgatagtcggaaaatatgatgccacgaaaatgtttgatggcccattatcgtggtgtcaatggaggtatttctatccaaatggggcacggtttcttgaatccatgttaaaaaagtatcattatttacatacaacaaaatccacatgaaatttaaccctattaatatgtggcgtttttatgggatataacgtcaaataattgctcaataaaaaattgtcgtgagatattatcgaatcacaactgttgatagatgttctaatagtgttttgagcgagatggtttaaatttaatatcattcgcaacatgggaattgaatttatcagatggaaaaataaacataaatatgccaacaggaaatataccctatggatttcaagatggatcgcgacggtaagggagtgaatccccgggagcatagagaactatgtgaccggngtgagagagtgccagccacaaagaggcaactttgaagatgacgggtatn

SEQ ID NO: 5249 - DNA, 700 bp, Photorhabdus luminescens
catggatcattttaagataagcctccgaagggggaataccttgccagaaaaactgtctgatccactcaagcactccagaagccagattccccaagcctaatggagaagaagggcttgttccaatacagagatccgggcatagatcaaaaaaacacacatttcccaccataaaatggatataacaactttatttatccacagccaaccattaatttttataggtggtattagtctgctaagtaacttaagtacttttttcatccgaagacagtttactgggctgtcacattttgctccctgtttgttaagaaaatttatacaacaaacagatacaaatattgagtttccacaaaaggaatatttttatgctgaaaattattcaatccccatccaaatatattcaaggacctgatgccctgctccatattggtcaatataccaaaaccatcgccgatcacgttttggttatcatcggtaattccgcgatgaaattggtgggagatacggttcatagcagcctggaacaatacgaaattactcgtcattttgaagtgtttggcggtgaatgtagtccgaatgagattaaacgcctgtctgacattcttaaaaaacatgaatgccaaaccgctattggtatcggtggcgggaaagtacaagataccgcaaaagcggtcgcttacgaatccagattacctgttcg

SEQ ID NO: 5250 - DNA, 786 bp, Photorhabdus luminescens
agcttacgcgccacactgatagtcacatttttctctttcaatccacgttgcccaatcgcaccggggtcctgaccaccatgtcctgcatcaatagcgacaactacccgctgaccgcccttagaagttgtttgcaaaacagcctgttttgtcgtccgcaatttactgttagtaagtgatagcttacctgtatcggcttgtgaactctctctaaaaacagacttgccagtaggtaccccagaagcccgtagggtaaaaatcacccgatattcactatccaactgctgcactatagagttgactttaactttattatttagttcaaatacaatgcgttttttttgtcgatcaggtgcctggctggaacggattttccttactaaatcctgctccggtaaattcataggtaaaccaacaattttttctgattgatggatatctaccactaaacgctctggcgaatgcaatgggaaaaaactgtaattagggcgaccaccggaaaaaaccatcgtcactttagactcatttatgctgttactgacgtgaatattggataaagtcgccgcggctgcggttgttaccactaaactgctcatcataataaacaaccagcacattatcataaaactgatctgccatttctttatcatttttgcgactaaaggacacatcatggtcgggtgatcccttataaatatttcaatttatctaacaggctctcaccatatttagaacaagcaataaaatgtgcctgtctccctttcggctgggtactcaaatgtaattcat

SEQ ID NO: 5251 - DNA, 691 bp, Photorhabdus luminescens
tggatgaatactaagaataaaaaattattgcagacgatggaaagccgcctactgcctcacattgagatttacgatttggcttctttgacagcattgatataatcaagaaattattctgtataaaaacacagcaacctctgggtgctgtctaatcaattgatggtaactatggacgtctcctatctgctcgaaagtctgaatgacaaacaacgggaagctgtagctgctccgcggactaatatgttggtattagctggcgcggggagtggtaaaacccgggttctagtacaccgaattgcttggttgctatcggtggagaaggcttcgccattttctgttatggctgtgaccttcaccaataaagcggctgcggagatgcgtcatcggattgaaaacttgatcggtaccagtcaaggtggaatgtggattggtacgtttcacggtttggctcatcgtttattacgagcccatcatctggatgctaatttgccacaggattttcagattcttgacagtgaagatcaaaatcgcctgcttaaacgcattatcaaagcgatgaatctggatgataaacaatggccagctcgtcaaggcatgtggtacatcaatggtaaaaaagatgaacgattgcggccacagcatattgtaagttatggcaatcctgttgaggcgacatgggccaaaattatca

SEQ ID NO: 5252 - DNA, 782 bp, Photorhabdus luminescens
  misc_feature (701)..(701): n is a, c, g, or t
aatcattgagcaggaatgtttgtttctgccagaatggtcatgctctttggttacagttataacattactaataatttgctctgttatctttttttgctgaggaaagacagaggatttgtattgtttgtgaaatgggatgttcaatgtaatcatgatattcgtcgagggcggttttaacttctattaaactaaaggattgtttatggggaaatcatcaaacaggagcgcggaatatttctttaccgggaattatttcgctgatgacaatgataatgacattgaggccattggatttgggggttacatttatgcctgcggaggaaatgaccatattacgctggggtcgattgccgccaaagtctataccggcacaggtaatgataccgtagttggtggtgcagcatatttatcggtcgaggattctaccggtaatctgaccgtaaaaggtggtgcgggttacgttgatattgataaagatggtgatggtgatatttcgttttttggcgctgcgggtggcgttgttatggatcataccggccatcacggtgatttggactttaccggcacggctatttataacgaaatgaaccgtgacggtttgacgggtaatatgatcttcgaaggttcgggcggttacaacaaattatggcacgaaaccaatcagggcaatttatactttaatggtgctggcgcgggaacanatcgaccgcacttggatgacattacaatggagccgtggcatgcacatttatggcgcaggctgcaacagattagctccgata

SEQ ID NO: 5253 - DNA, 699 bp, Photorhabdus luminescens
  misc_feature (484)..(484): n is a, c, g, or t
  misc_feature (640)..(640): n is a, c, g, or t
tttttagatatcttatcagatatgttttaaatatcaatatagcatcttgacaggtttttacaggaggtcattgatgacccgcgttcccgacaccgatttagtccacttaaagcaaaccgtctcgttactggggctggcgcgtaagcaaggccgtccgatgaaaaaacgcggtgaggattatgtgctgcgctgtccgttccataacgagaaaacgccctcaatggtgatatcgccggctaagaacctgtatcactgctttggctgtggcgcagcggggtcggtgctggactgggtgatacaaacggaaggggtgacgctgaaaatcgctatccgccggctgcgggagctggccgggttgccggacatggacaatgcagttgtggccgcttcttctttagccgccccgccggagtcacaggcggcccccctgccgcgcccgaaactggccgacctggacgatgacgggcaggcgctgttgcatcangtgattgatttttatcatcagcacttactggcatcaccggaaggcaaagcctggctggcacgacgcgggctgatcatcctgaactggtcagccacttcggctcggtatgcggtcatcacggatcagcggtccggggattgtgccgtcaagacagcngaagtcacattgcgcggaagctgcggctggctgtgctacacaccgcagacacttcggca

SEQ ID NO: 5254 - DNA, 789 bp, Photorhabdus luminescens
  misc_feature (739)..(739): n is a, c, g, or t
aatcttttacgtcgtaaaatcgagatatccaggatagggtttcttagccaaaaaccctatccctatggaccctctaatatctggctccatactagtaccactatttctaaaagctactgtcttctcttaaggagtaaataaatactcacagtaaggaacaataggcttggtaatagtgccgccaaaaccgctggcacgctgtacaccaagctcagtggaccaaagatctcattaagtacataaaataggaagccaaagctaatccctgttactatcctcactcccatcggcacactgcgcagtggtccgaagataaaagagagtgccatcaacatcatcactgcaactgaaagcggcgcaaatatttttttccacatattcagttgataacggcctgattcctgttcactctgcttaaggtatttgatgtactgatataagccactgatggaaagcgcttcaggctcaagtgcgactacattcaactgttctggcgtcaggagaattttccagtcagcagaaatacgttgtgatccggtgatttttttgctgtctgtcagatcagattcttccacctgagaaagcttccataggtcgttatccttatcataaaccgcactggctgcatattttacagagagtagttttttatcatcattaaaatgatagatattgacgccttaatctcggtatcactcacaatccgctggatgtagataaaatcgccccatctatcgtncacatacctttatttgttgaaccagagaccaccagcatttctgacccgta

SEQ ID NO: 5255 - DNA, 843 bp, Photorhabdus luminescens
ttcgtaaggtaacacttcttgctcctggctgggatgacgtgtggcacttgtgagcggataacgaatttcacacaggaaacagctatgaccatgattacgccaagctatttaggtgacactatagaatactcaagctttaggctttgagttagtcggcttggagtttattcgtgcacgtgtttctacactgcggatttatattgatagtgagaatggtatcactgttgatgattgtgctgatgttagccaccaggtcagtgcggtattggatgtcgaagatcctatctcagtgctttataacctggaaatttcttcacctggcttagaacgcccattgttcacgactgaacattaccagcgttttattggtgaggaagtcagtctggttttacgtatagcaatgcaaaaccgtcggaaatggctgggcattattaaaactgtcgacggcgaaatgatcacggttacggtggatggaaaagatgaagtgttcgcactgagcaacatccagaaagcgaacctggtaccccacttttaaagttcggatgagggcacttggatgaataaagaaattctggctgttgtggaagcggtttccaaccaaaaattcctttcacgcgaaaagatcttcaggcgctggaaacagattggccacagccaccaagaaaaatatgaacaagatatcgatgctcgtgtcagcattgaccgtacatctggtgattatgacactttccgtcgctggtagttgtgaaaagtgactaccgatcgcgaaatacctagaactgtagattgaaagcctgaatcgattcggtcctataccgaatcaattgattacaacttcgacca

SEQ ID NO: 5256 - DNA, 775 bp, Photorhabdus luminescens
  misc_feature (743)..(743): n is a, c, g, or t
ctattacgctgcgcacagtatcagtgcaacatttatgggaattcttagctcattgattcctcttttgactgtgatcatcagtatatttgttttacgtgttgtccccactgtcggccttgctcttggtaccgttctatctctgtctggtttaatctggttggtcagcgccggtgatcccatatcattattgcaacacggtttaggccgcggcgaattgatgatgttgcttgcttccatctcctacgcactctatggcgtattaaccaaacattggtctattccattacccaactggcaatccctatatgtacaaatcacttttggtgtcctgttattactgccaaatttcctattgaccaaagatgttcaattgaatgccagcaatatctcgttagtcttattcgccggtattccagcttcgatcattgccccctatttatggatacaaggcgtcataaaacttggtgcgaataccaccaccatatttatgaatttgacgccgatatttacagctattatcgctattctggttctgcatgaagagatgcacagttaccacctgattggtggcagtataacgttattaggcgttatactggcacagcaactacgtacccctcttattagaaaaacctcaggaaattaatcatcagaaagcctaaaagggattcttactaataaaccgcccagtgtttcactgggcaataattggggatgagtaccatgataaataccgatatctnttaccagagctaatcctaatcctgccccttct

SEQ ID NO: 5257 - DNA, 694 bp, Photorhabdus luminescens
  misc_feature (661)..(661): n is a, c, g, or t
ggaacaggggttgttggttgatgaagtcatgacagctcatttccctccataccgtgaagcattgcttgaagataataatattcgtaaaaattctgtactgacctcttatgcgaagctgcgtccggcatttgaccgtaagtatggcacggtcactgctgcaaacagtacaccactgacagatggtgctgcggcggtcatattgatgcgtgaatcagtggctaaggcgttgggaacaaaaccgcttggttatctgcgtagctatgcgttctcggccattgatgtctggcaagatatgttattagggccgtcatacgccacgccaatagcgctcgatcgtgcaggtattacactgaaagatctaactttgattgatatgcatgaagcttttgcggctcagacactggcaaacctgaaaatgtttgccagtgatgaatttgctcgtaataaattagggcgtgctcaggcaattggtgaagtcgatatggacaaatttaatgtcttagggggttcaatcgcttatgggcacccatttgcagcaacaggagctcgtatggtgacgcaagtattgaatgagttgcgtcgccgtggcggtggccttgggctgacaccgcttgtgctgtggcggttggcacagcttggtattgaggtggaaaatgactcngctagatgtgtgacccatatacgtacaccactg

SEQ ID NO: 5258 - DNA, 789 bp, Photorhabdus luminescens
  misc_feature (761)..(761): n is a, c, g, or t
aagcttacgaacaccgccattggtctggtgtagaagttttacgtgaacttaaaaaacgcggtagtcatccacatggtgcgccaattgtgtttaccagcaatttaggtcgacctttatatggtgaaaatacccgtgatgttctgggaaaaccaagttggggaatatcacaaacccctcaggtatggctggatttcgttgcatttgaacatgaaaacacgctgaatattcagtgggatagtaacgatgaactctttcctgacgggttaatggataccttatttactgcctatcaggggttcattggaaatttaacggaaaacgctacacagtggagtaaagaattaccggatctgatgcctaaatcgcaataccaactgcggtatcagatcaataacacaactgaacctttgccggatgctcttctgcatgaaggggtgtttttgcaggcagaacgcacaccaaatattgttgctttggtgactaataataaggaaatcagttatggtgaattaagtttggccgctcgccggttagcaaccgtgttgcaaaaaatgtcggttataccgggagatcgggttgccattagcatggaaaaaagtgtcggacaaattgttgcggtattggcgatactttatatcggcggcgtttatgtaccggttcctgttgatcagccagtaaaccgacgtcgtgctatctgcgaaagtgctgggattcgcgtcgttatcattgatcctgaacaacacattgatcttgaaaacaanggtgatgactggcacaagatgtgcattg

SEQ ID NO: 5259 - DNA, 700 bp, Photorhabdus luminescens
tgttttctccatgctggcacgcagggaagttgccttacgtaaatcaaaatccatcaacatgactgaggtaaaatcaccaatcagatcttgaacctctggatggaaaggttgccggttaaagaatgtcaggttgagagtaaacagcggatgacggctataccattccagagtatgagcaaacagcgtcagcagaccggcggaaggcgtcacaccccattgttgccagcgttgtttaagcatttgccaatcagattgtgctaatcgaccttcataagtggtgaattgtggctgacgacgctgaggcaattgtggattcagcggcaatcttggtgccggaggcaacgaaggtaattggtgctgccaatatgcccatgatgcctgccactctttacttgcccgttgagcttgttccgccatcacatagtcacggaaagtaaacacctgcgggatcagtggcttctggtggtaagcgcgttgcaagtcgtccatcatgattcggaaactctgtacgtcaaactgcaacagatccagattcatatgtaagcgacaacgtgcattcggtaacagagaaacagaaacttcaaacagtggccactgttcctgccgcgggacctggtaaaaagcgtatgacgacgctgaaccagtgcctgttggtaagctgtctcatcgcctacgccaatatcttgggacacagatacac

SEQ ID NO: 5260 - DNA, 774 bp, Photorhabdus luminescens
tctgtttttattccaaaggataacatttgatctcttaaaccagaactaattacaaggtgctcgtcggcacagcataaatctttaattttttgtgaggtaggatttctaatggaagtatgcagccaagagtaagtttttaccgggaaattaattttttcacaggaaagtcgagcaatattacaagatgttgtgtctaaacttattaaaatctcggggtgaaatctttctaatatcaaggacagttcacatgcaatatccgggcgagattcgtcattgcttggcgttaaggagatatattgagcatgagataaccaatcacgattttcaattctatttttcttattcagagatatgaaaatgaaatcaatttcaatgttggcacggccaatcaaatttattaaattcgaacataccgtttctaccccaccatatccattcaagaaaagatcatggtatattatgaatatttttttcattaaaaatcctttatcgaattaaccaaaaacgctcttgcacttttatttcattaatagttcgatgatatttctccaatgaaattaaaatgtttgatttattatcaaatagaggttctaattgagactcataaaataggatgttttgtgctttttcttttaaatcaatatccaccaatatggcacgcttatcaaatttattatttcttaataaagcactttccaaactatcagggttaataatagggtattcacctaaaacatagggaaaatcttcataaagcaatatcttaaacttacg

SEQ ID NO: 5261 - DNA, 685 bp, Photorhabdus luminescens
ccgcagaagcgtggcgtatgtactcgcgtatataccaccacccctaaaaaaccaaactctgcactgcgtaaagtatgtcgtgtgcgtttgactaacggttacgaagtttcttcttacatcggtggtgaaggccacaacttgcaagaacactccgtaattctgatccgtggcggtcgtgttaaagacttgccaggtgtgcgttaccacactgttcgcggtgcactggactgttccggtgttaaagaccgtaaacaaggtcgttctaagtacggtgtgaagaagccaaaagcttaatggtactccgttaagtaaggccaaacattatttaccttaatgtcaaaataaactcgtagagttttggacaaccctgaattcgaaacggagtatttccatgccacgtcgtcgtgtaattggtcagcgtaaaattttgccagatccaaagtttggatctgaattactggccaaattcgtcaatatcctgatggtagatggtaaaaaatctactgcggaagcaattgtatatagtgcgcttgagaccctggctcaacgttctggtaaagagcacctggaagcatttgaacttgcattagataatgtgcgtccaaccgtggaagttaagtcccgccgtgttggtggttctacttatcacgtaccagttgaagttcgtccggttcggcgcaatgcg

SEQ ID NO: 5262 - DNA, 768 bp, Photorhabdus luminescens
ttctgaaagttggcatttcctgtgtgtcagtattaacttgggaagtttaatattgggactgcgtgatttaagtagcacgttaattgttgaagatgttttaccattaccggccaacaaggaaaaatcctttttagatagcattattgatgagattgatgcattttttggtcgctatcaatctcgtcttgagcgtctgacggcaattagcatgacggtaaatgcgattgttgatccgactcaaggtttaattcacagtttcccttattaccaggttcaggaattgccaataggagaatatctgcatcgtcgcaccggattaccggtatttcttcaacatgaaataaccgcctggacgatagctgaatcattatatggcacagcaaaaaattgtcagaatgttatccaaatggtcattgatgaacatgttggtgttggcgtgattattgcggggcaaacattgcatgctggcaaccgtggtgtcatggaggtagggcatattcaggctgaacctaatggtgaacgctgttattgtgggaattttgggtgtctggaaacggttgtaggtatcagccatattttatccagagccaaacggcagttggcaatggtacccgattctttactaaacggtgaaccactgaccgttgagtcattctgtcaggcggttaataacggtgatactctggcagtcgatattattcgtgatattggagtaaaattgggcatattattgcattatggtcaatttatttacccagaaaaaatttg

SEQ ID NO: 5263 - DNA, 693 bp, Photorhabdus luminescens
  misc_feature (693)..(693): n is a, c, g, or t
cgccttcacttcttagcggatcgtattcgcaaagcaaaatagttgcatctggcagtccttcaaaatgcgttaaatgagaaggcgagataagtggatttgttctactgttgtgctcattaatgtatgcctgccaaaagaatgccatcatctgttttgtcaatacataaccttcaccatatttatcgtatgaatccgtttccattgatgcatctaaagctggatagaatagcaattgatagcaaatagcaggcccttcttggtttcgcgacatcaaacaagcggcaacggcaagattaccacctgcgctatcaccaccgaccgcaatttgttgcctattgataccaaacttttccgcattatcagtgacatagcatagagccgcatagaaatccgttagtggtaccggaaaagggttttctggggcaagccgatagtctaccgagaaaataacgcaacccattgattccgccagcttacggcaagggcgatcccaagcatcaagacttcctaaacaccacccgccgccatgagcataaaccagcgcgggtttatcactcatcttttcttttccatagggtacatacatgcgaaccggaatagggaaaccatcctctgcgaggacagtaaagctgctattatatgtcgcatcgttcctttccccctgttgctggataagagcatgctcaagaacan

SEQ ID NO: 5264 - DNA, 774 bp, Photorhabdus luminescens
atgaagttgctttatctggcagatagggtatctatgaatgactatggctatcctatcactggcgatcgaatggtatctatgccgagagggccagttttatcgcaaaccttaaatttaattactggagattacgccagtgatgaatttgggtggggggcatggattaaaagtgaaaagaattatgaaatttcactcaaacggaaaggtataacaagggatgattttgaatctctttctgatgctgaattagaagttctggatgccatttgggaacaattcggtcatatgagccgctttgatattgtggagtatacccataaacattgtactgagtggcaagatccaggcggcagttcttatcctatttcaccaagttctgtttttattgctgtcggtaaatcaccagaagttgctgagaaattggcgcaagagttaatagaaaggcaacaactggactgttttcttcaaggattgcggtgatgccgggtgggattttaaggaaaggaagtttacttatcccatctggatatacagatcacttatatattatctgctgtgatccagttttttaccctaaaaaaacgaagacatgttttttggctgtaaatattagctctttaaaactggacataccgtatgatcgaacgtgtatattgaattgtggcgatcatccttttattagacatccgagttttgttttctatggtcgcgctgatattcttggctcataaccgctgaacacatatggctgctggtgatattaaatctgaacca

SEQ ID NO: 5265 - DNA, 712 bp, Photorhabdus luminescens
agtcaggacattggcaccacccaccaataccgaggaaacacggccactgcctttttgggtcatgacattaaaaccaccggcacctaaccagctcgctctacccttgcctatctgcgtgtgcgtattgtagccacctagcatcaccacccggctattaccattacctttatggatcgagatattacccactgccaaaagatgagccagaaatcgtccatccccaacccgcaccacaacatttgccacccctccggcattaacatccatttctccacgctgactctgatgaacaaggacgttagcagcaccagcaccgttaaaattaacattgccttgcgtgacgctggatataataatatttccaccgccagcgccactaaattgaatatcaccggagctctcaccattacgggcaaatgagttcacaagttcttgctgacgatactctttggtatgcgctaatcgatcagaagcacgacgtattgttgtattaagactattatgcagttgacttagtgtgcagccacccgcatttatagcgcgataaccgttcgtcagcgaaatatcttcatttgccaattaccggatgatacccgctctgtccacgcgctgcaaaaattaagttctggtacaggacatttccatttactacactacttagtgctgatccaatcttggatcacatactattggtgacatccactatcgcgaa

SEQ ID NO: 5266 - DNA, 772 bp, Photorhabdus luminescens
tggtctatacagggtatcaaacgcctgcaacaaatttgtaaaaactacaacgtgagctgtagcagctcgcctaaaaaaattaactggaacaagctactaagtcgtgttgacatcatcccaacccattttgttgccactcaggccgcaacagaatctggttggggaacatctaagcttgcacaacagaataacaacttatttggtatgcgttgcggtaacaactgtaagaaaacccaaggtaaaataaaaggttattccgcctatccgactatcaatgattcggtcaaagcctatatgagaaatatgaacacccataacgcttatgaatcattgcgtgcttcacgcgccaagcagagaagccttcaggaatcactcaataccagcaaattgattgataatcttgaaggatattcacaattgggttcgacttacaacaactacctgcacaaagtatttaacagcaataaagggcttattactcaggcgcagaagttagctaaaaacgatcacgactaagagcctgagtaagtcattagcatgaatatcttgtgtttgaatatttgtgctaagtaccaaaatcatccgttaccataaccaactatggaacggatgattttcttatgtccaccggtttattcttttcattgatagaatgtttaggttaaatactataatatcactcaatcttatattgagataaaatgatttaccagagtttaaatgaatttcttttcttttgagattcttggttcctctgttgctttctttctct

SEQ ID NO: 5267 - DNA, 679 bp, Photorhabdus luminescens
  misc_feature (630)..(630): n is a, c, g, or t
gttgggctgcgggtaaggtactggctcgtcatggttctcgtaagatcattatcggtaaagatacccgtatttctggctatatgctggaatcttctttagaagcaggtttagctgcggctggtttatctgcttcgttcactggtcctatgccaacacctgctgttgcttatctgacccgaactttccgtgctgaagctggaattgttatctctgcttctcataatccttattatgataacggtattaaatttttctctattgatggtacgaaactgccggatgatgtggaagaagcgattgaagctgaaatggaaaagccactgacttgtgtggaatccgcagagttggggcgtgcaaatcgtattgttgatgctgctggtcgttatatcgaattctgtaaaggtacatttccaagtgagcaaagtcttaatggattgaaaattgtacttgattgcgctaacggtgcgacttaccacattgctccaaatgtactcagagaactaggggctgatgttgtgacgattggctgtgaaccaaacggtatcaatattaatgaaaagtgtggtgctaccgatgttcgtttggtgcagcaacgtgttgtagaaagaaagcacatgttggttcggcatntgatggtgatggtgatcgcgttattatggttgaccattgggacagaaat

SEQ ID NO: 5268 - DNA, 778 bp, Photorhabdus luminescens
cgaaattgcgaagaggagagtgccttttgctgctctttcaaaaaatcccataatttcagaaatgcaataaaatcggagtctttatcagcaaatcgacggtgtttctcatcagaagcctgctgtttctccagtggcctctctcttgggtcctgaatagatagcgcagaagtgataaccatcacttcacgtacacaaccatgttgacgagcttccaataccatacgcgccagccgaggatcaaccgggagctgagcaagctgtcgccctattgatgtaagacggtaatgactcttagccattgcgccttgatcaatagccccaagctcctccagaagccgaacaccatcctgaatattacgtttatcaggcggttgcacaaatggaaatgcactgacatccccaagaccaattgccgtcatttgcagaatgaccgatgccaggttagtacgcaggatttctggatcagtaaactctggccgagaaaggaaatcgtcttctgaatacagccggatacagatcccgtcagatacacgtccgcaacgcccctttcgctgattagccgacgcctgtgatatgggttcaatcggcaatctctgtactttcgtgcgataactgtaacggctaatacgtgcatacccggtatcaatcacatatttaattcccggtaccgtcaacgaggtttctgccacgttagttgccagcacaattctccgccccgtatgtgactggaaaatccgattctgatcactgttagaaagacgcgcaaataatggcagtc

SEQ ID NO: 5269 - DNA, 685 bp, Photorhabdus luminescens
taaatacattcttgccagaaaaattagattcagaattatggaagatattgagtgagcgtttggcgttctgcaatctggatgttaatcaaaaagaagactttgccaaattgaaggcaattcttaagcaggataatcggcctgcaatccattattttgcgatgccacccagtacttttggttcggtttgtcacggattgggccttgcagggctaaataaagagccaaatcgagttgtgatggaaaagcctttagggaccgatcttgaatcatccaaagccatcaatgatgaagtagctaaatatttcaatgagcgtcaggtttatcgcatcgatcattatctgggtaaagaaaccgtattgaatctgttggcgctgcggtttgccaattccttgtttgtgaataattgggataaccggacaattgatcatgtacaaattacagtagctgaagaagtcggtattgaaggccgttggggttattttgaccaagctgggcagatgcgcgatatgattcagaatcacctgttgcaaatattgaccatgaatgctatgtctcctccggcagatctgacgacagaccgtattccggatgaaaaagtaaaagtttgcgctctctgcgctggattgatcataccaatgtgcggggaagacggtaccagtcaaacactgttggtttgttcagggct

SEQ ID NO: 5270 - DNA, 752 bp, Photorhabdus luminescens
ttacaccgcaagcaatgattggtcatagcctcggtgaactggttgcggcctgtgtagggggtatgcttgaactggaagatacactggcattggtagcaaatcgagcggcaatcatgcagcgccagcccacaggagcaatgctggcggtacaggcatcatctgaacgtatggttgcgctggcaccggagtgtgaatttgcagcactcaacgggcccgcacagtgcgtgataactggcagccatgacaatattgcggtactggaagaacaatgcaacaaggcaggtatttcttgccagcgactaacgacatcacatgcatttcatagttcattgatggatgctgccgcacaacagatgcgggaattcagcgcaggcttcacgctacaatccagtaccattccgatgatatccaatatcagtggccgttggttcagtgaacaagatcgcgataattctggttattggggagatcatctgcgtcggccagtacgcttctatgacggtattcttacgttactgaaccattatgacaatccgatcctgcttgaagtcggtccagggcgtgcactgaccagtatgctgaaagatctacagcaaacaggccaagcccagatactaaccacgatgcgccatactcgccagcaaaaaccggatgaagaggtgctgctcaataccgttgggcagttatggcagcaaggaggtgctatcgattgggctgcatttggtcattcacacaaattacatcgggttatg

SEQ ID NO: 5271 - DNA, 672 bp, Photorhabdus luminescens
tggctaagattcgtgcatctcaatttgattttattatctctgattggaatatgcccaatatggatggtttagagttactaaaaatcattcgtgaagatgcccaattggccaagataccggttttgatggtgaccgcagaagcgaagaaagaaaatatcattgctgctgcgcaagccggggccagtggttatgtcgttaaaccttttaccgcagctactctggaagaaaagctcaacaaaatatttgaaaaactgggcctctaaggagacataatgagtgtaaatccagtcatgccaagggatgagaccattagcgccagtgaaattatcagccgtatcggccagcttacgcgcatgttgcgtgatagtttacgtgagttgggattggataaaactattgctcaggcggctgaggcaatacctgatgcaagggaacgtttggactatgttgtgcagatgacagcgcaggcggcggaaagggcgcttaattgcgttgaagcggcgcaacctcgtcagaatgagttagagtcatcggcaatatcactgaaaaagcgttgggatgagtggtttgaaaacccagctgagatgcctgtggctcgctcgtggttatagatacccggaatacctcatacggacctgacatactgctttactacgctcaattgctgagata

SEQ ID NO: 5272 - DNA, 785 bp, Photorhabdus luminescens
  misc_feature (720)..(720): n is a, c, g, or t
  misc_feature (745)..(745): n is a, c, g, or t
aagcttattcaacttcgtcacgtgtgactatgacggaaattcttgatcgtcacccatccccggtcgtgatcgcatttagtacgaattaataattactgaaagtttttctcttgttataaataagattccaaaatagcgccacatcttacatcactcataatttcgcctataacaataggttagtaaattcgcgcgtggcagaatcatgaaacgttatttatattaatatgttagtgatgaattagatataattttttaatattggttaattttcggataaatatgaggaagtaaaataaatataaaacacctattttttgtagaaactattattcttataataattatgttgtttaaacaatagagagatgccaatgagccgtcgttatgcctttaatactaaattgattttttggtagttggttttagattatttttatcgatagatggtacagattaagattatgagccttggcaacaaaacttaatgaagaaatacggggttatttgatggctcagtatgctgtttaccgcaataaatcccctaaatcgagggagtaataccctttcattatcgacattcagaatgacctattagacgattataattcacggacaatattacaaagtcagtgacaacggtagcaaagaattgcctcaaatagacgcgttaagagcaaaagatacccaaaagtcatcttggttggcggttggctattntaattattggtagctccatgcactnttagctataatagctattcgagccattttagacgggaggg

SEQ ID NO: 5273 - DNA, 694 bp, Photorhabdus luminescens
  misc_feature (687)..(687): n is a, c, g, or t
cgtcctccattaacacctgaacaaattaataaaaacagtcagacttatataaatcagcttgcaaaagttataaatatcgaaaatattgaaataaggaaaaactcagaatggtttaacaatatgccattcagtaatgtcataaagttaatctctaaaatcactcttgcacaaatcatgcaccgagatgattttaaaacccgatttgaatcaaaagcaccagtccatttgcatgagattatttaccctattctccaaggatatgactcagttatgattgatgctgatatcgagcttggcggaacagatcagttatttaataacttggtagggagaacacttcaagaagcctatgagaaaaaagggcaaatagtaataacaatgccattattagaagggctagatggcattgaaaaaatgagtaagtcaaaaaataattatattgggttaactgataatgcaaatgatatgtatggcaaagtaatgtcaattcctgacagtgtcattatcaattatttgacacttgctacagacatggaggcagaaaaacaatctgcgatagtcagtcaactagaattgggccttaacccaatgaagatcaaaaaagatatcgcttataatattggtaaaagatatcacgatgacctattctgcaaagaggccactgagcattttgagccgggagtccanaagcggc

SEQ ID NO: 5274 - DNA, 776 bp, Photorhabdus luminescens
  misc_feature (751)..(751): n is a, c, g, or t
aagcttcaacgggattcatcccctgattagtaccacctaaattacgcggttcatccaaataaaaggagaaatctcttgatgtacattcaactttcaatccagctacagattttactgtggcagtaaataactctttcgccatgatccaactccttataattaatgttagtttttcacaggggaaaatagagatatacccgtcatctttcaaattgcctatttgttggctgcactcactcaccccggtcacatcgttatctatgctcccggggattcgctcccttgccgtcgcgatgcatcttgaaatccattgggtatagttattataacttttaatttttctccattttgtttttaaagtgcttatcttttaattgttctttcttgctcttcctcttgagaaacccatgccggatgtggaatgtgagctgttaaaactttagtttgattattcatatagatttttgctaatcaggataaaattcaggggacagtatctgggacataccccaaatgcatacgtcgggaaacacgtctaacccggtttcgttcattgctgaggcaacggctttagaccaaacaacatcaacccagtctgaatcatttaactttgtctttaagctaggagattcttttaaaccataaagaatctcttttctttgcgctttaatgggtctttcccaacttgttcctctatggcttggctggtatttccattttaataagtgagcaattaatactggcatgcggntagccaactcacgctgttcactctt

SEQ ID NO: 5275 - DNA, 683 bp, Photorhabdus luminescens
ctttagctgactggcccgctttgggaaacctacccggagaccagaactgcgaagttgtggttatcggcggagggttgctgggtgcttccacggcattgcatcttgctgaagcgggagtggacgtgattctggttgaaaaggataacattggttcaggagcttctggccgcaacgggggacagataacccctgggctcgcacgctgggaagctaagaccatactggaaaaactttcattcgatgaggctaaacgcttatggcgttttgcctctgttgaagcgatgaatctcttggatgaactccgtgagcgttatcgtttcgaatgtgaccgcaaatatggtcatatcactgttgcagtgcacgcaggccacatggggccgctggtggctaatgccgatgcccggcgtcaactgggagatacggcgatgaaggttatcgggccgcacgaattgcaggaagagtatgtgcgttcgggcatctaccacggagcaaatatcgacagtatcggtgggcaggtccagcctctggcactggtgcgtggtctggcttatgggtttccccgactgggtgggcgaatcttgacagcacataagtggaaggcattaagcatgatactggtcgcacagtcgaaaaacttgaccggggactatcaaggcaagaaagcccgggggttcggtgtgctt

SEQ ID NO: 5276 - DNA, 774 bp, Photorhabdus luminescens
  misc_feature (695)..(695): n is a, c, g, or t
tataccttatggatttcaagatgcatcgcaacggcaagggagtgaatccccggtcacatagttaactatgtgaccggagtgagcgagtgcagccaacaaagaagcaacttgaaagataacgggtataaaggttttcaatctcatcaaggtctattattatcaacaccctgactcctaaaggaatgtaattaccatgcgctgtaaaatgttgactgccgctgctgtatcatttgtcatgctgactgcgggttgctctacgttggaacgggctgtttatcgccctgacattaatcaggggaactacctaacaccgacgagtgtatcaaaaatccacaaaggaatgacccagcaacaggtagcttacacattaggaacaccaatgttacaagacccgtttgggactcaaacgtggttttatgtatttcgtcagcaacctgggcacgaaaaagtgactcagcaaactctgaccctgacatttgacagtaatggtgtactgactgacattaaaaacgaaaattcacttaccgaagatcttcaataaccgaagaaatatagacagtcagtcaaaaaaatagatgactgactatctatagtaattattgagcattatttttagcccgctcagcacgcttacgacgcatttcttttggatcagccaataatgggcggtaaatttccaccctatcaccctcttncaaaatatccgtcaacttaacaggacggctataaactccgagtttattcttttgcaaatcaatatcattacgcaaagca

SEQ ID NO: 5277 - DNA, 687 bp, Photorhabdus luminescens
cgacttgattgataagtggactcctccggaaggttggttttccgatatcggtgcagcgaaagggaaagaatatctgatagactttttccgtaactgtagaggctttcgcactcactaatgacaggggcatcagcccctttcttctttaatcccctttaatatttccgtttccatacatggatgatactgaatgaaacttacagaggagtatcatcatgtcaaccacgacttaccatcttcaatttccctataccacggctgctggcgttcgcattgaagagcttcagttatcacgtttgaaagttaaagatatcaaggctgcccggcgagccagcgaaaatcctactgactgggatgatattttgatagcacgttcgacaggattgttaccagaagatatcgaacagatggatgttgctgattatctggcattacagaaacgatttcagcaagttatcggattggatcagggaaataaaaacagtgtggcaagcatcggcgatgttggcacgatggttccggttccagccgagcgagattgataatctgggcgctggatgaatttgaatgttggttgaatgaggcccacacccaaatcaaacgcgagaatggaggcggttaattcctcgtcacagaattttccattggtgtcactatttggggggcccttaatagtgccgtcattct

SEQ ID NO: 5278 - DNA, 775 bp, Photorhabdus luminescens
  misc_feature (613)..(613): n is a, c, g, or t
  misc_feature (678)..(678): n is a, c, g, or t
atatgcgcaacatactgccccatgctgcccattttcgtgtactggcaattgatatgctgggacatggcttcacggataaacctgtccgttcctatgagattatcgattatgtggaacacctacgggatcttattgaaacattaaatctgaagaaaattcacctttctggcgagtcgctaggcggatgggttgcagcccggtttgcggcaaaatatccgcaatatattcaccgtctggtgttgaacaccgccggtggcatgattgctgatccaaatgtgatggaacgcctgcgcacactgagcttaaatgcagtgaaaaaccccgatcgggaagctacccgcaaacgtcttgaattcctaatggaagatcctgcaatggtgacagaagacttggttgaaacccgttttgccatttatcgtcagccgggtatgttgtccgcaatggaaaacatcatgtgcctgcaagatatggatacccgtttacgtaaccttttgaccaaagatgaactggcaaagatccaggctgaaaccttagtgctatggaccacacacgatccgactgctgcggtttcagtaggccagcgtcttgccgggcttatcaaaaatagccgttntgtcgtgatggaaaatgcggcactggcctatatgaaacccggcacatttaccggtccattcgatnttactcaacgcacaaataatgccctttagagagtgatttcaattggatgcactctatgttggcagagcacacaatatacctaccttgaaatgtaatg

SEQ ID NO: 5279 - DNA, 702 bp, Photorhabdus luminescens
attggtgagctgtattcgggggaattaggcagcgcagatagcaaagttatataccctatggatttcgagatgcatcgcgacggcaagggagcgaatccccgggagcatagataactatgtgaccggggtgagtgagtgcagccaacaaagaggcaacttgaaagataacgggtatagacgtaaatgagagttattttgttgttacatctaaagtggaaggtaagtgatggctaagatttacgaattctctgccaatgatatagcaactattgaaagtcataaacatttgcccaatactatgaagtatggaaacggcaatggtggtggaggtggtgatatgttggaagctcgtgtagcaaaacttgaatcagacgttgagcatatcaaagccacaatgagcgatgtgaaggctgatctgaaatcagtcatcagtgatgttggcacaatgaagaccgacgttgctggtatcatgcaaaaattagatgtaatcaataatactttgtctaagaaaccaagtgagacagcttatgcaattacaagcagaatagattgttcaatacagaggagcagtgcccatacaagcaatattatcattcgagtgagagtagccatacaatcaatatcatcaatacgagtagagtgcccatacagcaatatgtcactcagagcccattgatactgatatatcttctacgagagtag

SEQ ID NO: 5280 - DNA, 784 bp, Photorhabdus luminescens
  misc_feature (774)..(774): n is a, c, g, or t
tcttattaatctggattggagcacgctgcgctcttagcagcatatcaccaaagtgagttttaacttcattggcagaaagttcatacatatttgtagtctcacaaatatcgttcgattcgcttagtttgattgaatcgaacgacaatcaccacgatcattacctaaaaacactgcatgtcattcaaccaatttctccaaacacccctaaaaatggatggtaacgccatgcttctccgtcatctttcttcctaagacgaatctcaccaaaatgttggcttacattttttaactccatttcatttgtatcagccaaattctggtaaatcgtctcagtatcaagttcaatccaagcactcacaccaagtgcaaactctaattctggcacatagtcaaacgtgtcgctttcttttatccctgcctgaccgctgtccagagccacaaacttcgcttcttcaccctcttctccaagccacaaataatgtagttcatcaggttctgattgacgaaatggtttatggcgttgtaattctgcacaccatgaagcctgttctcgccaccaaagagctgagcagtaaccgtgtttattatcagagccaccttgaagttcttcccataaacgttgatgttcaagatcgaccaaattttcaaaaggtgaactatctccagcattatcgcgttcctttattctcggcaatgcactgattagttcatattgataaggttccagtaattcatgttaatcatgattagcaaaaagataatctttcgactcanaccctgggcg

SEQ ID NO: 5281 - DNA, 691 bp, Photorhabdus luminescens
cggacaaacactgcttgggcaacgggtgtatgcacaactggcagatattccacaggctgttgatatggttgatgtattccgtaatgctgacgctgcatatgacattgcgcgagaagctatagatatcaaagcaaaagtgctctggttgcaacttggtgttattaatgagcaagcaaaaatattggcagaggaagcaggtctggatgttgtgatggatcgctgcccaaaaattgaaattccaagattgggactcgaaaaataatatttttcagcttgtagttatttggtttctaattagtggatgaagggaccctggcaccaatatctaatgtaaacttaaggcgttggatgagaagcggtgtccgggttccaagtgttcaaaataatgtttgagttggatattgagtttacttttctagacatcttataaaatctatttttacagttattacaatatcttaaggaaaatttagttgctcttattgctgctaaattttgccagaatctacacttttattgctataagatatggcgcttttggtgcgccctaccattgaccctttctcactcatcaaaaacaacctctttattccaaagacaaaatatacatctcctgcaaatagcgtgtttaatttctatccctaattcttaacacccaccactaaagtaatatgtacaatgcacgtccgcc

SEQ ID NO: 5282 - DNA, 782 bp, Photorhabdus luminescens
atcctgatggtaacttacctgatttgagaggagaatttattcggggttgggatgatagacgaggtattgatagtggccgtagaattttaacgcatcagggggatgctatccgaaatattcagggttcgttcgccggcatgatagcactaaattatcatttggcaacaagaggggctttttatgctagtcaagttcttggaatagcgacagatggcagtttcaaatcgataaatatttctgacacagatactccatacggctttgggttcgaggcgtcaagggttgttcctgtagcctcagagaaccgccctcgcaacatagcatttaattacatagtgagagcggcgtaatggctgaacaaaaatacgcttgatagctagaaatagaagaagagactgctttctacttggatggaaaaaattttgacccttttttaacggcaaattttaatttattgatttttaagtaaatattgtttatcccacaaaaaagggttttttattttttatcatggttgctctttaacattcaataggttggggttaatatgtaacaagtgcactgccgtacaggcagcttagaaaacagccggaaaattaatggcaaagcattaagtgtgcactgccgtacaggcagcttagaaacgtaatttcctgcttatcattactctttaaaggtgcactgccgtacaggcagcttagaaatacgtttgcactcttctatatagtgagggttagtgcactgccgtacaggcagcttagaaacgtatttcctgctatcat

SEQ ID NO: 5283 - DNA, 695 bp, Photorhabdus luminescens
  misc_feature (598)..(598): n is a, c, g, or t
  misc_feature (641)..(641): n is a, c, g, or t
ccgcttcctgacgtttacgaacctccgcagcgcgaatacgggccgccaataccgacatcgctttcgctttgtttttatgctgtgaacgttcatcctgacattcaacgacaatgccagttggaatatgagtgatacggatggcggaatccgtggtgttgacatgctgtccacccgcacccgatgaacggaacgtatcaatacgcagatcacttggactgatttccggcaactcggcgtccgggatctccggcaaaaccgcaacggtacaagcagaagtgtgaatacgcccctgcgattcggtttccggtacacgttgaacacgatgaccacccgattcaaattttaaatgaccataaacctgctcaccggaaactttcgcaataatttccttatagccaccatgctcaccatcgttagcactgatgacttcaactttccaacgacgggattcagcataacggctgtacatacgaaacaaatccccggcgaaaatcgccgcttcatcaccaccggtttctgcacgcacttcaagaaaacagttacgctcatcatcaggatctttcggcaacagcaacaattgcagttgctgctctaattnctcattgcgaaccttagcgtccctgatctcttcctgtgccatnttccgcatttcaaggtcatcaagcattattttggctgcttaagatcatcctgaa

SEQ ID NO: 5284 - DNA, 756 bp, Photorhabdus luminescens
ccagtttataagggtcaactttgttgctctcaattaacaggcgattcactaccacgctaaccacaaatgaaaaacgatcagccagggcatatttttcactggagaaataccagcgatagcgccatgcttctgtctcggaaggaaaattatcccgtgactcttggttgcgtttaattaatatcttgccttgaatacgatcaaatttaatgacacgtgctttgagttcatattcgggtttcggttcagcttgaactgtacgggctaatgttttttgggatggtccagatggcgtaatgatatatttcagggtgatttcgtcattttcttcaatcatggccgggaaggggctttgggcgctggaggtgatccaacgttgatcttcggtagcattttgatatgtggcatcggcataaaccagttgataatccatatcttccaaccacactgggctgttttgccagaacaatttgttttgctcaaatgcctccagtattctttccagattgtgctttaaacccgtgctattgcgtgtgttaagggagaatgtctctcctgacacttcagtgatcatctgaccccgcaaggtaaattctctatcattgtcagtgatgatcaggttaatgacctgcccttgcaataagcggcctgctgtccctttttgggtgattcttaattgatcatcttcaaccaccagagaatcaggcttttgcttagtattaaattggatatcgggttttgccggtagtaattggcgag

SEQ ID NO: 5285 - DNA, 672 bp, Photorhabdus luminescens
acgatgtgacactactgatcgccgccggagaagatattacgaccgctgtaggaacactttgccaattaggcaaaggattattcgctatttttgacggcccaacaacccaaatagcctcaacacaagcaccagatgatgtacttaaaccttatccagcaactcaatatggcgcagtttactatccctggctgactgctgaatggggagaaaataaagcctccattgatattccaccaagtgccgtcatggccggtatttatgccaatgtcgataacagccgaggcgtctggcaggcccccgcgaatgtccctgttcagggcggattacaacctaaatatccgatgaccgacgacctgcaagggagatataaccagggtaaggcactgaatatgatccgtacctttcctaagagcgggacgctggtctggggagccagaacccttgaggacagcgataactggcgttatatcccggttcgccgcctgtttaacagtgcagaacgagacattaaaaacgccatgagtttcgcggtatttgagcctaatagccaacccacttgggaagcggtgcgccgggcgattgataactatctccatgccctctggccacaaggcggattgatgggtaacaaagctgaacaggcttattttgtgcaaatcggtaaagacgtct

SEQ ID NO: 5286 - DNA, 773 bp, Photorhabdus luminescens
  misc_feature (669)..(669): n is a, c, g, or t
  misc_feature (762)..(762): n is a, c, g, or t
tgataatgtttttgtgattgggagagtatttgccacgagtatcgacaactaatttggcgtgattgataattaattcataatcaaatttgtcgtgatcggtggctaaaataacgcagtcgaaggttttgagactattttccgtgatgggctggctgattaaattaaaatgatgttcccgcatcttcggaaagaccgggacatgcggatcggcatattcaatattggcccctaattcgcttaatttttccataatatgtactgaggggctttctcgcatatcatccacattctttttataggcgatgccgaggattaatatgtggctgccattaatggatttattcgctttgttcagggctaatacggttttagtgaccacataatcgggcatggaggaattgacttcaccggagagttcaataaagcgggtattgataccatattctcgggctttccaggttaaatagaaaggatcaatgggaatacagtgcccgcctaatccggggccgggataatagggaacaaagccgaaaggtttggttgctgcggctctaatcacttcgtgaatatcaatgcccattttatcggcaaccagtttcatttcgttgactaagccgatattgaccgcccgatggatattctccagcagttttgtcatctctgccgctntggttgagctgaccggaacaacctgatcaatcgcgtgttgataaacggcgatccccgcttttaagcagttttctgtgtggccgcctatgactntaggaatggtg

SEQ ID NO: 5287 - DNA, 679 bp, Photorhabdus luminescens
  misc_feature (562)..(562): n is a, c, g, or t
  misc_feature (659)..(659): n is a, c, g, or t
  misc_feature (663)..(663): n is a, c, g, or t
cttacccagcccaccaactttactgatcaactgcccttctacccaactatggatatcttctgcatcactttgcaagatggcttgtgggttagcctgaacctcattcagcaattcatttaatgccagctccaatctttgttgttcttcaacggtcaacacaccaaccgttatcaacgctttcgaccatgcaactgaaccggtaatatcctgttccgctaaccggtaatcaaagcgaagtgaatcgttaaattgtttgaaccgttgatctgctttctgactgaaacgcccgccccagagtgccatatttttgttcctgattatctgatgtctgagtgattgattacctttcataaacagcaatttcattcgcaacatggagataatagactcgaaaaatcaaatacaaggatgaattcacgatctggtcattacctccataactacgaacgatgaaattactctttactatttaatgcccgaatgcgcgaagggagagaatacagacggataaatcctgctgcatggctgtgatcgtaaacctcatcttcaccaaacgttgcanacgcttcagaataaaggctattcgctgatcttttctggatcgctgttacctgccctttatagagttttagtactacttcaccgctgacatccgcagncaangtctcagccgctgtca

SEQ ID NO: 5288 - DNA, 765 bp, Photorhabdus luminescens
  misc_feature (698)..(698): n is a, c, g, or t
aacggtaaactccaggcgaaaagcctgacattgacacaaggccccaaccagattgatttcaaacgcggaacccttgttcccatgacaggggaagattatggcccttgggaagcgattgataccgggttattagggggaatgtatgccaataaaatccgtctggtgagtaccgagccgggtaaggttgtcaatctgaccaacctgacggcaacccaaggcgacatcagtctgacggcggatggcaaggtgactctgggggatgtacaggccaaaacggatatcaccgttaacggtaaagacattgacatggtgaaaaaaagtcatatgcaagccggtcaacatctgatattgacaaccgatacattgcagagttggggacgaattcgtgccgacggtgatgtcactattaaagcgaaaaccttgtctttagatgggggaaatatcaccgccgggaaccaggttctgctacagggaaagaacagttttacggtgcgtggcacggatatttcaggtcatgacattaccttgattgccaatagttataatacttctgtttcacctagtgacaccttcggaaagcccacaagtattacctattatttctgccgttaatacgctgcgtattctgtctgaacagggaatatcgctttcagatacgctaattaaccgggcgaaaatatctttatggcgagtaatgngtggattggtattaatcagcatttggcggcggatgataatattgatcttcacgcctgagggaggatg

SEQ ID NO: 5289 - DNA, 678 bp, Photorhabdus luminescens
aatacccgacagaaaaagtatgatttcaaacttatccaaataatataccgcttctatgtaaagttttgcccacttatttacacgaattttcatgccaataaagtgtcagcataagttaatcggctatttgttcaatcttattccggctcatcacaatgattttaattatcgtttcatggtctataccattgtctatcattgcatacacgattttcacaagcgccagttttctacctatctgtaatccttttctgtatccttctcgatatgcttctcgatatgcttttcggcatgcttttcggcatgcttcttgatatccttcttggaacgctttctgctccagtttttgcgctattgtcaccaattacctcctcatatttctagggggcggtcccgttactcgctggacaagcccctcttctaacacgaatctttaaataccgattacggctctcagcacgaatcagtgatgtatttgttcaagttcgttctggctcaaccctgtacttttcattatcgtttcacgatcgataccattatccatcaatgcacgcgcgattttcagactcgcccgtttttcacctttctcttcacctttcttttcacctttctcttaccttctttttcacctttctgtaatacttcttgaagcccttcttcgcgtgcgtgctgacttgt

SEQ ID NO: 5290 - DNA, 768 bp, Photorhabdus luminescens
ttaaaccaaagctcaccctatttttcaagtcttagttgagtattgcctcgaatgcgtccgacaaaatcccaaccgagcgtttttatatgtttgaaccatgcattttgaaaacctgcatccgtaacaataattactctggctttagggttaacagcacgcgctagcctgtcaagaaatgcattttgtatcgttacattttgttgttcacatgagggaactatttgacttaacaaaggaattgagcgtccatcgcaaattaaactcgcacggagcacatggtgttcttgtgacggatatccactccaatcaacagcaatgacacacagcgacagagactcagtgagcattgaaataatgttgcgaaagatatcaggaatatccctatgaagagcttcattaccgagtagccggtcaatacgtttaattttatgtttgacgtgagcgtttccgggtaaaaagcgcccaatgctggttaacgtaagagaagcaccattaatcaaagcgatagtggcatcgattaatgcattctgacgatatttatgaaatggtgataaagcatctttaaagaagttatgacatacttcacgtacaggcatagcagtgaccttattgacttggtggaacaattagtagatcacataacgctctgcctgtgtatattctgtggagatctctcagatctatgcgggtggttatattgttgagatgctgccgctacttaaactggctacagccataataaataccttagatgaaaatctgaagttt

SEQ ID NO: 5291 - DNA, 691 bp, Photorhabdus luminescens
tcgttgatagaatgattgttgagcttgataaaacactcagcactcaagttgatgaaattatgcatgccaaagagttccaagagctggaatcatcatggcgttcactgaaattgctggttgatcgtaccgattttcgtgaaaacatcaaaatcaacatcatccatgcgaccaaagaagagttactggaagatttcgaattttcaccagaaatcatccaatcaggcttatacaaacatgtctactcaacaggttatggccagtttggcggcgaaccggttgcggcggtcatcggtaactatgcgtttagcaatagctcacccgatatcaaactgatgcaatatgtcagcgcggttggcgcaatggctcacgcgccattcctctcttccgttgcacctgatttctttggtatcagtagctttaccgaattaccagcgattaaagatctgaaatctgtcttcgaaggcccggcacacaccaaatggcgtgcgctgcgcgaatcggaagattcacgttatctcggtctgacaacaccgcgcttcttgttacgtctaccttactcaaccgacgaaaacgcaatcaaaaactataactatcacgaagagaggagttagaccacgatcactacctgttgctggggggagataacgtgtatctgctgggcactttgttgactgacagctcctcccaatat

SEQ ID NO: 5292 - DNA, 777 bp, Photorhabdus luminescens
aagcttatcattggttgccaaaaagatatttttcgcccggttaatcagagtatcggcgatattaataggaccctcggcgataatgcgtaatatgttatcagcagaaagcgtggttaatacccttattccctcaggggtatagtcatctccagagacaacagacagcagcccccggctggcaagcaaggtcacatcccgaccggagatatcataaccattcacatcaagatgtgattttccatccagcatgacatggttcccggcttttaaattcccctggcctaaatagattgtttctgcgtcaacggctaagttttgttctgccctcattgacgcacgatttgctaaatctcgggcagtgagagaaatgtttttcccggtgattaacgccagatccgtaggtttctttcccgctttaaaatgttctttattaaaatcaaaactaaatccctctttaaagacagccgtcaaatccccaccggcactcagtttaccaatgatattctgctgattgtcttttatcgctttggttgaaaaatttttgcctgtcagggtgagattttgtcccgcgcttaactcaccaacattatttatctcgttcgcggtaatgctgttgtttttacccgcggtaataatcgggtggctttgcttagtcgggtttacgttatcaagttgagtcgctttaatcgtgacatcaccatccgcccggatttggccttgattcctcagtgtttccggggtcaatttcagatgttgacccgcctgcacatggctttg

SEQ ID NO: 5293 - DNA, 681 bp, Photorhabdus luminescens
  misc_feature (650)..(650): n is a, c, g, or t
ataccattgtggttccgacaaaccgtccaatgatccgtaatgatttgccagatctggtttacatgaccgaagctgaaaaaattgaagctatcattgaagatatccgcgaacgtaccggtaaagggcagccggtattggtggggactatttctattgaaaaatctgaactggtttcccgtgaactgactaacgcgggtatcgagcacaacgtacttaacgccaaatttcatgcaatggaagcggacattattgctcaggcaggtcaagcgagcgcggtaaccattgcgactaacatggcgggtcgtggtacagatattgtgctaggcggtagttggcaggcagaaattgctaagctgaccgagccaacagaagctcagattgaagagattaaagctgcatggcaggaacgtcatgatagggttctggcggcgggtggtttgcatattatcggtacggagcgttatgaatctcgtcgtattgataatcagttacgcgggcgttccgggcgtcaaggggatgccggatcatccccgttctatttataattggaagactcactgatgcgtatttttgctctgatccggcactagcatgaagcgtaaactgggtttaaaaccggggaggcaattgaacatccgtgggtaaccaangccattggccatgctcaacgtgaagtagaaa

SEQ ID NO: 5294 - DNA, 781 bp, Photorhabdus luminescens
  misc_feature (698)..(698): n is a, c, g, or t
  misc_feature (775)..(775): n is a, c, g, or t
  misc_feature (781)..(781): n is a, c, g, or t
aagcttttgctactaaagagtacgactttcggaatcaaccaggtataacccgtttgttgggttttctccgccagtgaccccgttttcacgaccaagcgcaactgtattctgtcgttaggacgttgtggtgtctgcaaaatttgccagttaaaaccgttttccagtttaccttgtttccaggcagggtcaggctgcaaggcttctgcctgcgtctggcccgcaactgccagcattatcccaccaataaaataacgaattttcgtaccctgcatgtgaacccctatagatgtctatccttggttttagccttcgaaggtttaaccattgatgacagaatatgttcccttcgaccaataataacggtagaaaaagcaaaaacctgaattttaacaggcgaaatcctgtcaggcttataacagaggattagacctcaaaccgccatgaatggtttcatgatgacggaggtttatgcttatcaaattgacgattatatcccctgatcagcaggcccagttcatcatcctgatggtatttagggcaagccattggctctgatagttgcgcgttattaagatcccgtgcaatgtcacgtaatgggtgcataataatccggttgatacaccagcttatcgacaccgtaaggataagggccagtaataaataagttgtcagcatcagtgccaacgtattaatgacanaacgatatactccgttggaatccacttgcaaaatcagatgccctagcggtttagcatctgtcgatactgaaccatanacatgn

SEQ ID NO: 5295 - DNA, 686 bp, Photorhabdus luminescens
  misc_feature (632)..(632): n is a, c, g, or t
tggagtggggaatgttccgtggggaagggcaggagacaaattacactccagatgtcagtttgggcaatcaggggcgtcatacgccgttgcctactgagtctggcgcaccagaattgaatcgtgtttttcacgagggtcttgctgcattgcgtgaatgtcggccttttgaacagggagctgcattctttcttttcggggcgctacagcaatttttctttgatggtaacaaacgcacttcacgtttcatgatgaacggtatcttgatgtcgaacggcatcgatgcaatcagtgtgcctgcggcaaaactgtatgagttcaacgaaaaaatggtccgcttctacctgagcaaagatgctactgagatgatgatgtttcttatggattgtcatccggataaagtggcaaatctcggtttttttaaatgatcataaaatgggattgcccaaacgaacgtttttggcacgaccccgaccactattgatctttctgttaaaacaaagtgcaggataaaaaaaccagcactttgttaataatctgaaattaacgcaacaaaattttggatagtttgggtttacaaccccgacactgaaaccttattttgaaattgttctaaagtttataccctatggatntcaagatgcatcgcggcggccagggagagaatccccgggagcctagataacgat

SEQ ID NO: 5296 - DNA, 789 bp, Photorhabdus luminescens
  misc_feature (662)..(662): n is a, c, g, or t
  misc_feature (768)..(768): n is a, c, g, or t
agctttggcaagcgatatccctgcgccacaaaagaaaccacgtgcccttgatcacgggcaagtaataattcatcaggaataagtggtccatcttgaataaaccgcaattttctctccttatattgaaaataatttcattatacttttttatcatttaccttagaataaggcaacttttttctatcccatgtttgtgtttctgatgttgttcataaagcgttaatatttctgaatcaggcaattgataatgtaatggattgataccaccttgattagattgttttgctattttagggtgttttccgatgactattttgctcatatatcgtctctttccctgtagataatatgatttcatcattgaattgttttaataccgtagcaaagtctgcacggactttatccagatcatctgctagagtttcaacgtcacttttctgtgagataagttcacaatagtttgtgttgggcataatatcgaatttcggtgaaattgatcttaatttattaaaatattgtatgaaaatggtcattatattatctgcattattagctgtttctattagttaaatgacttattaacaatgatattttattttgattgaagaatcatacccgataaatatatttatgctatagaaatattgcgggccgtttcaaanaaggactgaaataatggagataatttattcagatatgattagtgttattagattataattactgattacacatagttcgattgcttatgtgctgtttcctgaattntgatctatgctacatgtctat

SEQ ID NO: 5297 - DNA, 673 bp, Photorhabdus luminescens
  misc_feature (659)..(672): n is a, c, g, or t
gccggcaacaattccacctgtggctggccgtcaacagcaacaaaaacagaacgcaatgcttcatggcgggcaaacagcgtatcaagcgcctgttgccaagcggtgatatccaatcgaccacgcaaacgcagggccaatggaatatgataggtctcactcactccattaagctgggccaggaaccaaagccgttgttgcgcaaatgacaacggcaattggtgatcctcacgggatagcggaacgatagcgggcaatgccgcgcctgactcatcaaactgggtacgcatcacttcagcaaaagctatcaaagacgggaatgtaaacagtgtggacagcggtaattcaatccccaacgcggctatccgattcatcatcctcaccgccaacagcgaatgaccacccagtgcgaaaaagttgtcataccgactgatccgctcaacaccgagtaattcacgccagatagccgcatgtggtttcatctccctgaggtgcacgaaatctgcggcaaaatttcttcctggctgaatgccgcatcattgcattgggtaggaagctcaacacaagcgtgacatatatcgtaacgataggcatgcacgataacttcgttccaaccacacgaacacgaccatctggaatgtatcaactcaacacacaatatnnnnnnnnnnnnnna

SEQ ID NO: 5298 - DNA, 774 bp, Photorhabdus luminescens
aagctttctggcctttccacggcaaaaagacacggcggcgcaaatccctggcaacttcacgcccgtgaccaaaaggcgcaatcatttcaggaaaaaagatatgtggacctgagcgccagtctgtgtggataagctctctttctcccgaaagaagctcatctcgattctgctcagataaaaaagcccaattacaaaaggcgattgggtgcccttgtccatctgcatagtagcaaaactgattcagttcaaatgcaggcaagatacgctgttgccactcggacaccaggtatcttcgatgcagaggagaatactggctcagcagcatcactcctccaatcattgcctgaatttctgcggtattcagtttcgctggttgatgtataatcgccatgcgctaatcaaccatgagattttattttgtatttttagataggcgttttttagcgttagccggctcttccactatagattccgatgcaatttgctcttcagccacttgtggcgcgggtaaaaaccctgctgcaactaatttatcaaattcagccgccattcgtggatcttccaacatatttttaaccatagaaaccatatacataaatcctgatgctggcatatggataacttgctttaattcaagttcattatcattttctgccattatcccattcgccatacgattaggttcttgaccaacgaaataaagagaaaaacacctttattataattaacactagagatgggttgtacgaatttttcagacatatttttatttac

SEQ ID NO: 5299 - DNA, 681 bp, Photorhabdus luminescens
  misc_feature (621)..(621): n is a, c, g, or t
caagtccgcgctggctcatcaggaggctccttattcgtggggttagtcgataactgtagcggatttcgcaaattgttgctgtgatttacgctatcggatgcagttgctgagaagtaattaaattgccagtttgttgcaaaatagtaccaagctgtagcttgaatatcttcggtgggggctgtttcaacaggtagccagactgtgccctccatagcaagtacggcatgtctcgccgaaagcaggaaaattaagggcgcattttaatggattatagttgtcagaggtagcttaagatgcgcacatcaggtaatcttcgcgccataaagcagttggagaaacgaatgaacgattcatacagtggtaaaaatggcaaagtcaaagtgatgtatgtccgcagtgagggcgggaatgacagccgtaataataacaaacgtccatctggtaagggacgtgatcagggtcagcgtcgtcgggacaatgagcgaacattccgttctccgcgtgccaatgagcgtgaaaaatcgccttggaaaacagtgtcacgccctgagagtgattcttgaacgccaatgcatggtggtatcagtgggaaaaggcagattgatcctgaacagttccgtntctagcgaatggaaaatacccgattcatcggcaaattgcttgcaggcgatgcgtaaaaca

SEQ ID NO: 5300 - DNA, 778 bp, Photorhabdus luminescens
ttcggacggagcagccactatgctcatcaacaaggtggtaaaacgtaccaccagccgctttatcgtctcctctgcaaacaaatccgtgttgtactcgaaattaaaagtcaggccgtcctctgtttggctggcatccagtgtcaattcatacatcgcattgcgggtctgttctggcctcggccacaaacttaccccttctaattgcagctccacactgtcattcgtattcatagaaaacatgatttggaacaacggtgaataacgggtgctacgttccggttgcaaccgctccactaataactcaaacgggacattttgatgccgctgggcagcaaggtttacctcccggaccgatctcagataatcgataaacgattgctccagctcacactcgctgcgcaataccagcgtattgataaaacagcctatcaacggcgttaatgatgtctgcaaacggttagctatcggggttcccaccacaatatctcgttgcccgctgtgacgactgagcagtatcgtaaatgccgcatgcaacaccataaaaagagtgcacccttgtgtcagcgccagttgctgcaaccctttgctaacctcattgtccagactaaattcataactgcggccatgactggtttggttggctggtcgcgcgtaatccagaggcaacccgtgtaccgggggtaaatccgataactgttgctgccaataggctacccctgctgctaactgagattcttctgctgcgctgtgttgccaactgcataatcgcatactgaat

SEQ ID NO: 5301 - DNA, 688 bp, Photorhabdus luminescens
gagcatgttgaacacatcacgcctgatatgttggatatggtgactttgagtgaaaaagagatcgcagttatttgccagcaagttgagggtggtgccggtaacatacaagatatttatccattatcacctttgcaggaaggcattttctttcaccatcgaatgaatggagagcacgatccttatattattccgattctgataaagttttctgatgagcaaaagttgacagcttttctccatgcgcttgataagatcgtagagcgtcatgatgttttccgtacttctattcattggcaggatttaaccacatcggttcaagtggtccatcgaacagcttctattccccttcattggcaagcggttattccaggtctttcggcgttggaaactgtgcaacaggcggcctttgaacgccattatatgaagctggatcgcgctcctatgatgcaggcgattgtggcgaaagggacagagagtggtgaatgttttctactattaaagcaacatcacttactaagtgatcatatttctggcttattgcaaattgaaaaaatgcaaccgctgtttgaagatccaaatgtgggattgccacaccggttcaataccgggagtttggtgctcattctttaaagatcaaccaatctgacaacggggtggttactttaaagctaattgtccgtggtcgggg

SEQ ID NO: 5302 - DNA, 774 bp, Photorhabdus luminescens
  misc_feature (681)..(681): n is a, c, g, or t
  misc_feature (774)..(774): n is a, c, g, or t
cggctgaaatcgaagccgcagagcaacgtgaagccgaagcaaaagcagcggcagagcgtgcagaacgtgaaaaactggaggcgctaaaacgcgctgagcttgaaaaacaagctgcaattgaagcagaacgtcgtaaagcagcaacagatgagcacgctcgtttggctgaaattcagcatcagaaagatgaggaaaagcggcgtcgggctgacattgatcatcgtaaacgtattaataatgagtctctgcaagagttaatcaaaactggaatatcggaagaatgtgcaatgaattgcattaaagctatagcgtccggcaaaacatctcacttaaaaatcatctattaattatgaaaataaacaaacatatttttagcttagctcagtctaaagctagaattgcacgtaatatagatagccaaataatatggaatattgcaatgcaatatctaaggttagcatatgaagatagttaaagagtggctcttcgctatgttatttcccgcctgtttagttctgttcacaacgttaattttaattttcctgaggtaattatgtttaagatttattgtgattcttttaaagtgaatcttattaataacagaaatgaaatcgagataaatggaagtgttattatacaagggagctcagaagaagtactcaattcaacaaactcttgctntaatgaaataaaggaatattttgagcaaaagggttataaaatcgaggctttgtgaaatgaacccatatgcagtttatgatgagattgaagaan

SEQ ID NO: 5303 - DNA, 687 bp, Photorhabdus luminescens
ttccagtaatgttgcaagccgaatagcgcaggtaacgtttatcactctctatgccattgaccggaatatgagcaagttcaatctgctggctggttaattctaatgccgatggttcatgatctttttgtaaggttaccggcagtattccgcgctttgccaactcaccatacgttgctttaagtctgaaaaccgcaaggtcgccgcctttcattgttgcgtataaaactctatcaacatcaacaggttggtgttcattaattaagtcaatgaagtagtttggcgtgtatgtccaacctgggcctacaggttgatcaatgatgacttcattggtatctaatgaagaatcaaaacaatggcccgcggaaagaataagtgcttgttgattggcatcaggggtttctgaaccggcaataagtgtcgcggtacattggccgcgaccgctcagttttccgacatgcttaaatcgctcagcgcccggatcggtagattttaatagtggagcttcgttgctggtattgtcttgcagatcagcaatatgctcgctgttattttcgggaagtgcttgtgcaaaaaaacttgctgatacaatccctgtaataagtgtagctaaaaaaaatttcttcatatttttacctcgtgttggttacattgctaatcctttcctgtaatggagacagacattcaatg

SEQ ID NO: 5304 - DNA, 763 bp, Photorhabdus luminescens
  misc_feature (655)..(655): n is a, c, g, or t
  misc_feature (685)..(685): n is a, c, g, or t
  misc_feature (739)..(739): n is a, c, g, or t
  misc_feature (763)..(763): n is a, c, g, or t
attcaacttcgtcacgtgtgactatgacggaaattcttgatcgtcacccatccccggtcgtgatcgcatttagtacgaattaataattactgaaagtttttctcttgttataaataagattccaaaatagcgccacatcttacatcactcataatttcgcctataacaataggttagtaaattcgcgcgtggcagaatcatgaaacgttatttatattaatatgttagtgatgaattagatataattttttaatattggttaattttcggataaatatgaggaagtaaaataaatataaaacacctattttttgtagaaactattattcttataataattatgttgtttaaacaatagagagatgccaatgagccgtcgttatgcctttaatactaaattgattttttggtagttggttttagattatttttatcgatagatggtacagattaagattatgagccttggcaacaaaacttaatgaagaaatacggggttatttgatggctcagtatgctgtttaccgcaataaatcccctaaatcgagggagtaataccctttcattatcgacattcagaatgacctattagacgattataattcacggacaatattacaaagtcagtgacaacggtagcaaagaattgcctcanatagacgcgttaagagcaaaagatacccanaagtcatcttggttggcggttggctattttaattattggtagctccatgcactnttagctataatagctattcgagcn

SEQ ID NO: 5305 - DNA, 688 bp, Photorhabdus luminescens
  misc_feature (688)..(688): n is a, c, g, or t
ctggatgaacggttgatgcatccagcgggttatcaccgtgattaatccgtaagaatccggcacattgttcaaaagcctttggcccaagacgattgactttcagtaattgtgcacggttattgaaacggccattctcatcacgccagttgatgatattctgggcaatcatacgggtcaacccggcaactctggttagcagtggaacagaagcggtattgagatctacgccgacggcgtttacgcaatcctcaacgactgcatccaattttttggcaagctgactctgactgacgtcatgttgatactgaccgacaccgatggatttcggatcgattttcaccaattcggccagtggatcttgcaagcgacgggcgatagagactgctccacggagtgaaacgtccagatcaggaaattcttgtgccgccagctcagaggcagaataaacagatgctcctgcctcactgacaatcactttttgggcttttatctctgggaactgtgtttgcacatccgcgaagaaacgttctgtttcacgggaagccgttccgttaccgatggcgaccagttccacttgatgtttgagacacaatgctgccacgcttgcagcagctttagccgtttgcccggtgtgtggatagatggtgtctgtggcaatcagttgccggttgatcgatacagctacttn

SEQ ID NO: 5306 - DNA, 781 bp, Photorhabdus luminescens
ctaatatcgggtatagccgtttgttgtttatcaccaatgtatatttgcggggcgaaagagatagaaaaaccattattgctgttgctggcatctttataacctgttcgtttaattggattgcccgacattatctcaggaggtgagatttgtgggacatctggggtcattccctcagctagacgctgagtggcacgagcagccaacggcatagtgcgatcaataccaacaaccgcaccttgcacaatattatcgccaaatcccataaatactcgactgggggattgaatacccaacgcttctttaaaccagctagaaactttgccaccaaagtttttaatggtgtccttagccgtggtcagcatattagaaataccattaaccaacccattaacgatatttttaccaaagtcagtaaaattatcgggcatatcaatgccaaaccatttcataacgtcagcgaatgttttatagaacaatcccaatggcgaccaatttaaaattaatttactgacctcaaatattccgccatcaaacgcattagtaatgtcattccatcgagctgtaaaccaacctttgacgttagaccaaatatttttgattccctgccatcccatttggaaagcgaatttcactaagatccaaagcggtttaaagaaattactgatgggcttccaatagcgatagattagataagcgggccactgcataccagtgatgatcaatccgataggattcattaatagtacgcgtccaatccacaaaatagctctgccagctacct

SEQ ID NO: 5307 - DNA, 693 bp, Photorhabdus luminescens
  misc_feature (641)..(641): n is a, c, g, or t
agtgtcaccagtcggttctgactctttaagggagattagtcggttgcctgttaagagcgctggcaatctccagagataacgaacggaaagatggcttgaagttatgatgaaaaatcgtatttatattggcttatttgcttccttactgttacacgcgggcattctcgtgtttatggcgtggcatttactgcgtgatgacagtgcgaataatcaatcagtgaattcgccaataatcagtatgtcagtagaaatggttgcttcggcagcaccggccggacaggagcaacctgtggacccggaacctattccgttaccgccagagatagcggtagcggaatcacctcatgaggcaaaaatagctctcaataagccagtggataggccacggaaacaagaactgcccaaaaaacaggcagatgctaaaccgaagaacaagtctcagccacagaaagagctggtggaagatcctcagccaaaattggcagagcaaacggaaggcagctctcaattagcagggagagatgctgtggattcacaagctggtgcccgtcaagcgacgaccagcccacccatgattggcatgggggctgatgagttaccaaactatcagtccgccttgcgtcgtgaaattgaaaacatanacgctatccgcgtcgggctaagagatgaagaacagggtatcgcacaggcagt

SEQ ID NO: 5308 - DNA, 774 bp, Photorhabdus luminescens
  misc_feature (677)..(677): n is a, c, g, or t
taattcataaagattagtacagctttgcccagtgtcccgcccattctctcgaaaagttcactcactgtcattcattacactatgtggtaaattggttataaatcgcaagttaggacgatcgtaatagaaattccctgtttccaagtcatcagcaatcaatcagttatgatacctatcgtgcaatatttgtttttgtagttcaggtggcatagaagggtgattaaggtcgataagtccgaggggggacatttccactaaaaagaagtttaagtttagaatccgcaattctttattgattggatatgattatagtttccatgaaacactttccagaaatactgtaatatgaattatcgcatctggtttttattgaatttaagcctctcagtttttatactatcgttttttctgtcttacttctccgttaatgtgacaaaaatattttttcttggctatcaaaaaacacttgaaaataactatgcaaatgataagttttaatttcaaacattctaggcaaggaaaataaaaatgacaaataaaccgattgtctatgatttccatggtgataaaccattaagtaaacctgttactgatataaagccccaagacattcatatttatcttgatgaaattaacgatcttgttaataaaagattaaacggtgtgttaaagaatgnggtgttttctcgtgagctaatgaataacctctctagtagatcgatagagattaaaaatgtctaatagattatttggaatagaaaaaaaaccatccgg

SEQ ID NO: 5309 - DNA, 686 bp, Photorhabdus luminescens
tgaggtagtcatcgatcggtatcatatgttcccctgtcgggcaactgatgtaggcgaagtactcgcagcgatcaaacgtaaaatggccagcggtaaaagtttgatagcccgtttcggtattatctattgtacattttaaattcgtattcattttttcagccctcagttatgctgggaaaaaccatcaaattcaattaattcaggcagatatcagcccatttctggactgagacatcaccgagaattgactgaatcatcagagttgcaggcttatcagcatggaagcgataagccactttttcaggcaggagggcctggtgcccacgtttgaggtagatacatcccattttttgcccatcgggagtgccattcagcttaacagcgccatctttatcttcatcaatgaccgattcatcagtcagcttgacaaaatgcacctcaacatcataatccatagcaaccacaaattcgtcgtgcgcacaggcaaaccagggcgatgtcccttcggcacgagcgatctcgatggtatagtctaaattgatcgcagcaacgatacggtcgtagggtgcactggttgccgcgatttcataccatgttggaaaaacctaacggttgggatcttaaccagcgcttggatcccacctttgtgataattatccattgatgcgaatgctcgtttatattga

SEQ ID NO: 5310 - DNA, 829 bp, Photorhabdus luminescens
  misc_feature (740)..(740): n is a, c, g, or t
  misc_feature (748)..(748): n is a, c, g, or t
  misc_feature (770)..(770): n is a, c, g, or t
atcgtgattggccggttgaacatttttaccaattagcgcaacacatttgtggccgttatccccagtcgcatattatgttactaggcagtgctgacggtaaaattgctgcacagtcactggcaaaaagattaggggctgaaaagtgcacttcattggttggtagactaacaatgcggcagaatgcagcaataatgagtcaacttgatttgtatgttggtgttgataccgggccgacacatttagctggcgcattaggtatcccgatggttgctatgtatcatagtttccacccaggccgttttttggcacctcaacagcattcgcatttggtagttattgaacacccggttcactatatgcaagccacccgcaaagactcgatgtctgcaatatctgttgaacaagtctggcaggcaacgcaaaagttactagaaactcagttgtcaggaagaaaagatgaaaataggtttggttgatgtcacggtaactatgtcttacggtggtattcagacggcagtctgggaactggcgaaagcgttgactgatgccggtcatgagatccatatttttggtggaaagggtgatattcaaccagaactcaatgggagagcaatccaggttcacacttttccattcattcccagagagaaagtcattaatattggtcgacgttttcaacgtattattgaacgttactcatttgctcgccatgctcgcgatacagttgttactgaggattntgactggngtattctgacgaagcattgatntttgctatgacaaacgctattttacggcagttagacactgacatactggtctctatctc

SEQ ID NO: 5311 - DNA, 689 bp, Photorhabdus luminescens
  misc_feature (679)..(679): n is a, c, g, or t
aacttaggataagattatgctgagcactatcaacgacagaaagataaaatttgctttagtcggttgtggacggatcgctaaaaatcatttcaattctctggaagtacatcaagaagcagccgaattagtcgccgtctgtgataacgatcaagaagcattaaacgcagcagtagaaaaaaccggcgtcccgggtttcagcgacttcaatacaatgttggataacatcaccgcggatatcattatcctgaccactccctctggccttcatccagcacaggcgatgacctgctttgataaaggctttcacgtcgtcaccgaaaagccaatggcaacccggctggctgagggggaaaacatggtcaaagcggcagataaagccggaaaacacctgtttgtcgtcaaacaaaaccgcttaaatgccaccttacaattgctgaaacgggcggtcagtgaaaaacggtttggcaaaatccacctggtccacctgaatgttttctggacccgtccccaggcttattacgatcaagccgcctggcggggcacctgggaatttgatggcggtgccttcatgaatcaggcgagccactatgttgatttaattgaatggctaatcggcccggtcaaagatgttcaggccatgacatcaacccacttagatatcgaaacagaagataccggngtactcaatt

SEQ ID NO: 5312 - DNA, 831 bp, Photorhabdus luminescens
  misc_feature (648)..(648): n is a, c, g, or t
  misc_feature (819)..(819): n is a, c, g, or t
  misc_feature (821)..(821): n is a, c, g, or t
ccacagctattacccaaattttatttaatagaaaagcgaaataaccatattcaggaatatatcgcaagactttaaataaaaaatgcccatccctgacggtaaggagatgagcaaaatggtaccaaccaaatctaaataattatcaggccgtttgggctaaacttagtgtttgcaattgtttatcacccgcatataaacgcgcctcagtgccaccaataaaataacgatttcctcttgtgggtactgaagtttcatcaaaccaaacaacagcaaccgattcatgatgccagcctaggggctgaaccgaaagctgccagaaatgccctctaggactgacctcggtcacctgtaccggcaatggactggaaagtgtcggttgcgagttcatcatgatatcccacggacgcaagaatacatcaacattcccctgatggattggcgtcacattgagaggcaagtgctgtccgccaatcaacaactgagagcctttaatttctccactaaaatgattgacctcacccaagaactccatcacaaaacggcttgccggatacgcctacctcttgtggcgtacctacctgttaatattcccttgtctataacacaacccggtcagcacttcatcgcttcttctgatgtgagtacaanacgctggtaattaagctttatggactgggtaccacgcgtactcattttactacatcaggcacaatgctatcagtataaattgtggtacagcatgtctgcacgcaccgtgtttgcacaaagtcatgatactagaatgctatgcatcagatctactcgagtcgcatgactatngnctgacagaat

SEQ ID NO: 5313 - DNA, 703 bp, Photorhabdus luminescens
ttgccgaaaaaattaaaaaagatattcgtccctggttcagtcgagtgcctgaactgaccgcattcctgcaaaaaccgaccttggataactttaagatcatgatgactaaggtggataacggttttgaaatgatcaagattccgtttctggcggtaaaaatgtcgaacacggatggtatggggttacatttatctcaatggaaggcggaagcggacattttctatcgggaggagatctacaaggcgcgttccaccagtagtaaattaacgaatatggcggatgttacctataaagtgaagttaactgaacagcaaaccaatgattatggtattgcactgccctaccaaccatctggtgatcagtatggagatttcctgtatggcagaaaggtagcggcgggcagagtgctgacgcccggacaggaaacaacgcttgagcgtaacgccttggcgcaggggcattccgtggtgacgggggcatcgggctcgaccaatatcatggttcatctcaataactatattgccagtcaagatcctactttctcgcaagagcaggcctaccttaatacgttggcgtttctggtgtttgatggcggtcattccgctaatgaaagtttggtggtctataaagcttgcagacgaccggcgatgaacgtcggcaagacttacaacctcaccgccagtttatggatctgatggtatcg

SEQ ID NO: 5314 - DNA, 793 bp, Photorhabdus luminescens
  misc_feature (784)..(784): n is a, c, g, or t
ttctggcgggttgtattgcggaaggcgtgacggttgttgaccgtatttatcatattgaccggggttatgaacatatcgaagataagttgcgcggacttggcgcaaacattgaacgagtgaaatcaacgggaaagtaattgtacttccttaacttggaaataagaaatgggggtaattgtcgggtagctgtgacaatcgccaactttcttatttttttataatgctaaaaatattcacatatatagagtcagacacagaccatttttatacacattattgtgtgtaaaaatagttctcatttaaatagccctcaacagttttttaaagtaggtgttgagggcgcttgataccgaagagagtctcactttggtggtgaaatcgagtttggtacttgatgagatagctctttaaacaacagtaggctacggatttagccatcatcggatgaaaatcctgtttaaaattgataaacccataccagattggtaagtattcctctgcatttctgaaacgcaggcaagttcattttctacaggcataaataggcttcccatcattaatttactttagtaatttatctaacaagttaatatcttggttattgtgtaaatatgggtttgtccagccactcaagtcatagtcagaaagacaggattccaccaaatccatcattttcttcatattgccagaactataagcatggcgcagacattgcaagcggactccatcttgactaccagcataattgatttcgtatagctgatggcggctaccgaatcacttncatggcatc

SEQ ID NO: 5315 - DNA, 700 bp, Photorhabdus luminescens
cattcagtggctttccagccgcaatcgccgttgctaacacaccaataactgtatcgccagcacccgtaacatcaaacacttcttgcgcctgcgtaggcaaatgcagtggtggctgatcaacactcagcaaactcattccctgttcagaacgggtgatcagtaatgcctgaagatccaaacccttaactagccgagttcccttctcaaccaactcattgtcatctttgcagtggcccacgaccgcttcaaattcagacagatttggcgttagcaaagttgcacctcgataacgctcaaaatcattacctttcggatcgattaataccgggactttggccgcatttgccagtttgatcatttcctgaacctgactcagtgcacctttggcgtagtcagatagaaccaatgctccaatatggggtaacgcctgttcaatgcgctcaaacattggctgtgcatcgacgttatcgaaaccctcttcaaaatctaagcgaattaactgctgattacgggaaagtaccctaagtttattcactgtcggatgggttgggacagaaacataatcacagccgtaccttgacgctgcgcagttactcactcagcgcatgtgctgcgtcatcaatcccagtcaaaccgattaaatgtgaatatgcccaagagcacactattcataccaatttggcagcgcctccggacgcta

SEQ ID NO: 5316 - DNA, 765 bp, Photorhabdus luminescens
  misc_feature (688)..(688): n is a, c, g, or t
ctgtactgactgcgcatcagcactatcaacccgtgataccggtccgaactgctccagaataccgcgtaaaacctgcatagaggcatgagcagttttatccatcaaccaatgtacaggccgagaaagaggatagttaggtagagagccactccccaataacggcaatacaccaagatgaacattactggtggaagtaaacaccgcaacggcaccaccttgataaatctcttccagcagtttctccaattgccccaaatattgcgggcgcatcgctccacgggatgatgacaaatgtatccctgttttagccattgcctgatttgccgcttcaattaacgcaggatgatgttctaatcccaaataagagcaggaaacaaattcagtaaagactttgccttcctccgtagtaatttgcttaccttgacgttcaaccacagtgaaactggtcaaaccttcgtcgatagcttgcgctaaggcaccggttgtccgtgaccgacgaattgtcatccagtcctgcttatgttttacatccattatctagactccaactgtctaagttcaaatgcgcttacaaccaacagtgattaccgaactgcccgttgtgtcagaaatatcttcatcgataatagttcgtaccgaggagaagccaacatctgaaaataatgctctgacactctctccctgactntcaccatgttcaataactaaccaaccttctgattgcagtagctggttagcttgtttgataatcaaccgtgctaagtc

SEQ ID NO: 5317 - DNA, 681 bp, Photorhabdus luminescens
  misc_feature (585)..(585): n is a, c, g, or t
aacggtaaactccaggcgaaaagcctgacattgacacaaggccccaaccagattgatttcaaacgcggaacccttgttcccatgacaggggaagattatggcccttgggaagcgattgataccgggttattagggggaatgtatgccaataaaatccgtctggtgagtaccgagccgggtaaggttgtcaatctgaccaacctgacggcaacccaaggcgacatcagtctgacggcggatggcaaggtgactctgggggatgtacaggccaaaacggatatcaccgttaacggtaaagacattgacatggtgaaaaaaagtcatatgcaagccggtcaacatctgatattgacaaccgatacattgcagagttggggacgaattcgtgccgacggtgatgtcactattaaagcgaaaaccttgtctttagatgggggaaatatcaccgccgggaaccaggttctgctacagggaaagaacagttttacggtgcgtggcacggatatttcaggtcatgacattaccttgattgccaatagttataatacttctgtttcacctagtgacacgtcggaaagcacacangtattacctattatttctgcggctaatacgctgcgtattctgtctgaacagggaatatcgctttcagatacgctaattaaccgggcgaaaatatct

SEQ ID NO: 5318 - DNA, 770 bp, Photorhabdus luminescens
caatctgctctggcttactgtgggtatgcgccacggtagatcaataggaacatcggaagatctggtgattgtgaactgcctctctaaatctagtcattaaatgttgaatttagtttttgagggcagttcatctataattttattaactattcttcaaaataataggattgaaaataattcatgtctttttatctttttttataccgcacggcatagctccttttttaaatatagaaaatatttcttctaatttagcgtcttgattaaaataaaataaatatcgataaatgcttatcatatttaacatgtaattacattcgtcatttacttcatttagaaagttatcgtattctatgttatcaactaacctttttttctttcttataagatatcattttctttttctcatattttctttgacttgatcctgggtagatatttttattctgtgaaggatatccttttctgcttttttataatcctcatgaagataaaactcggatgccaaatcagagaaaaaatcactctaaaccatatagttacctagtatgccttgatcgaaaagaagctttaatgccctatctttattatccataatttcatattcattaaattcttcaatagaaccggataaaaaatccgagcttttaaagaattcaacgggttccatataaaaatttattatctcacccagattaaattatcctaaaattctactccagagatcaaagatgctttgtctgactttttaatttacgtcttccccctga

SEQ ID NO: 5319 - DNA, 693 bp, Photorhabdus luminescens
  misc_feature (633)..(633): n is a, c, g, or t
tcgttgatagaatgattgttgagcttgataaaacactcagcactcaagttgatgaaattatgcatgccaaagagttccaagagctggaatcatcatggcgttcactgaaattgctggttgatcgtaccgattttcgtgaaaacatcaaaatcaacatcatccatgcgaccaaagaagagttactggaagatttcgaattttcaccagaaatcatccaatcaggcttatacaaacatgtctactcaacaggttatggccagtttggcggcgaaccggttgcggcggtcatcggtaactatgcgtttagcaatagctcacccgatatcaaactgatgcaatatgtcagcgcggttggcgcaatggctcacgcgccattcctctcttccgttgcacctgatttctttggtatcagtagctttaccgaattaccagcgattaaagatctgaaatctgtcttcgaaggcccggcacacaccaaatggcgtgcgctgcgcgaatcggaagattcacgttatctcggtctgacaacaccgcgcttcttgttacgtctaccttactcaaccgtcgaaaacccaattaaaaactttaactatcaggaagatgtcagcaaagatcacgaacatttcctgtggngtaataccgcttatctgctggcaccttgtttgactgacagcttcgccaatatcgctggtg

SEQ ID NO: 5320 - DNA, 765 bp, Photorhabdus luminescens
aagcttcaggagattttttctcacctcaatcgtctgatccctttctgtgaagccaaaatcatcttttatccatcacaacaagaatatttctttcgcaatccccatcaatgtccctattttgatatgccgctgattatgagatggaatctagatgataatattgatagctatgggacactctggataaaaacacacaggaatagtgatctcactcccgatgaaaaaagtctggttcaggatgtggtgacgttaatgacaaataaactattacgggaaaatcagatccaatgccaacaccagagtatgttggccgcagagagaaccgctatttctcgtgaactccacgattccattgcccaatccctctctttccttaagattcaagttaattgtctatatatcggcagtgataatttacccaagcaaagtttaacctcgttgaatatgattaaagatgagttaaatattgcctatcgccagctcagagaattactggcaacgttcaggaacgaacaacctcaatgtaatctacaagaatctttacagaccttgattagtgaatttaaccatcgtctaggcttcaacattgaattcaattaccgcctgacacatcagcacattcctgacagttacagcaaacatttgatacaaatcattagggaatgtttgaacaactgttataagcatgccaatgccaattggatcagtatccgtatttatcctatcgatgacaaaatcattaccgttgtcagtgataatggtcag

SEQ ID NO: 5321 - DNA, 700 bp, Photorhabdus luminescens
  misc_feature (687)..(694): n is a, c, g, or t
  misc_feature (696)..(699): n is a, c, g, or t
atcctgatggtaacttacctgatttgagaggagaatttattcggggttgggatgatagacgaggtattgatagtggccgtagaattttaacgcatcagggggatgctatccgaaatattcagggttcgttcgccggcatgatagcactaaattatcatttggcaacaagaggggctttttatgctagtcaagttcttggaatagcgacagatggcagtttcaaatcgataaatatttctgacacagatactccatacggctttgggttcgaggcgtcaagggttgttcctgtagcctcagagaaccgccctcgcaacatagcatttaattacatagtgagagcggcgtaatggctgaacaaaaatacgcttgatagctagaaatagaagaagagactgctttctacttggatggaaaaaattttgacccttttttaacggcaaattttaatttattgatttttaagtaaatattgtttatcccacaaaaaagggttttttattttttatcatggttgctctttaacattcaataggttggggttaatatgtaacaagtgcactgccgtacaggagctagaacagccggaatatgcaagattagtggcctgcgcaggtaacatcgtttcttagctgccgctaactcttttggtgcccgactcttgcgactgccacacgcaccgctcgnnnnnnnncnnnna

SEQ ID NO: 5322 - DNA, 771 bp, Photorhabdus luminescens
ttggttaatgactcactttcagaacccgctagggggaacgatgtccgctgaaagtaaattacggctggtgaatatcctgaacagtaatcaggtggtgctgattgaagatgatgtttatggtgaactctacttcgatcagcaacggcctgtaccggcgaaagggttagacagtgaaaacaactttatgcactgctcctcgttttctaaatgtctggccccgggattccgtgtgggttgggtggcagcaggaaaacatgccaagaaaatccaacagttacaaatgatgagtaccgtttctgccagcatgccgacgcaattggcaattgctgattatcttgcggaggggggatatgacaaccacttacgtcgccttcgtcgcatattggagcaacgtcagcaactgatgttacgagcaattggtgactatatgcctgcttcagtcaaagtgaatcgccctaaaggtggctattttctctggttggaatttgagcctctgttcagtgcacagcggctttatcaactggcattggcagaagggatcagtattgcaccgggcagtatgttttgcaccagcgaacagtttaaccatgcctttcgtctgaatgcctcttttgattggaatcagcaaatggaacgtgcgatgcagactttgggcaatatttgtcatacattattggttgaaatagcctgatcccaggctgatattaatccctatcaaggagaagttcgtggagaaagcaacggtatttaaaagtaaccgttctaagtaaa

SEQ ID NO: 5323 - DNA, 688 bp, Photorhabdus luminescens
  misc_feature (624)..(624): n is a, c, g, or t
tttgctggtaacgctatcccggaactagcacaacgtgttgccaaccgcctgtacactaatcttggagatgctgctgtcggccgtttcagcgacggtgaagtcagcgtgcaagttaacgaaaatgtgcgtggtggtgatattttcatcatccagtccacttgtgcaccgactaacgacaacctgatggaattagtcgttatggtggatgcactgcgtcgtgcttccgcaggacgtattaccgcagtaatcccttatttcggttatgcccgtcaggaccgtcgagtccgttccgcccgtgtgccaattaccgccaaagttgttgcagacttcctgtccagtgtcggtgtagaccgcgtactgactgttgatctgcatgctgaacagatccaaggtttctttgatgttccggttgataacgtatttggcagtccaattctgctggaagatatgctacagaaagagttagaaaaccctatcgttgtttccccggatattggcggggttgtccgcgcacgtgctattgctaaactgctgaatgataccgatatggccattatcgataaacgccgcccacgcgctaacgtttctcaagtgatgcatattatcggtgatgttgctggccgngactgcgtgctggtcgatgacatgatcgataccggaggcaccttatgcaaagcggctgaagcta

SEQ ID NO: 5324 - DNA, 783 bp, Photorhabdus luminescens
  misc_feature (670)..(670): n is a, c, g, or t
aaacacaaaggattggaaaaatttttcaaaactggttctaccgctggcattcagcctaagcatgccctaaagctgcaaatccagctaactgcattgaatacggctaaaaaaccagaagatatgaatgcccctagctggaaacttcacccactaaaaggagcaaatcttagcggtcactgggcaatatctgttaacagtaattggcgtttaacatttagatttgagggcgaagatataattctcgttaattatcaagattatcactgagggcaacgaaatgaaaatgcataaacctgcacacccaggcatagttttgcgtgaatatcttggtgacatatctgtcacggaagcagcaaaggctctcggtataaccagagctgcactatcccgcatattaaacggcaatgcaggaatatctgctgatatggccctgcgactggaagccgcattaggtactagtgccgaaatgtggacaggaatgcagtcccaatatgaactgtggattgcctcacagcacaaaagaccagaaataaaaccaatactggctcactcctgatagcgtaataagagggctttacttagccagctacaacactacacaccatgcctaataaaaacggcaacccgaaagttgccgctttcaaatacgagaaaactactcttctagcanaaccacatggtcgatctaatgcaggtgactgacaagttgcgcgtaacttaatccataccctcacccaccataaactctcctgaattgagtaacaatccactgcaccggacatc

SEQ ID NO: 5325 - DNA, 687 bp, Photorhabdus luminescens
tccctttcttccaactcaattcttgtgcttctttggataacacccagtcaacaaaccgtttggcgttgtccatgttgcgggcatttttgatgatacttacgccgccgatttcataaccggtgctttcacatggcgcgataagtttcagtggtgcgccattttctacttctaatgagtaatcatgcaggaaaccgataccaatcgcagattcgccacgggcggcatttcgggctggggcaataccggatttggtgtactgagaaatattggtattgagttttttcagataatcaaatgcctgatctttgccccataattgaacaaaggttgccaacgcggtgtaagcggtgcctgaactttgaggatcggcaatctgaatttcgcctttatatatcggtttggtgagatctttccagcaggcctgtattcgcgcgactgtcgcgctttaaacgcccacccgctgttttctgtccacggcatctccctgagcttgcccccttatttcttttgccccctcctcattctacctcccatacccaccccctttccctctattccatccccccctttccacctttctttactccatccctccaccaactccactttcccttccctcctccccgttcccccccgcgctctacgcccccctccccccacatcacagcgccccctcccccttcccaa

SEQ ID NO: 5326 - DNA, 778 bp, Photorhabdus luminescens
tgtctttaattgcttatagtctgtttttccattacgatttttaggaatagcccctatcactaatcttgttggccacatacttctgggcataagctgttgacatattttacgtagctctagattagatttttcatgccaagaaataaaaaacactaatccttcaacacagttccctgctataacaggccagccaataaccgcaatatcgtcaacccctactgctttactcagcattgactcaatttccaaacgctccaaacgctgaccattgactttcagttgatcatcacaacgccctaaaaaatgaaatatcccatcattgtcacgtttaacccagtctccagtacgataccaataacaactaccatcatattcgaaattatcagcctgcatagtgttacttgataagtaaccactaaccacttgctcaccgccaatccataattcaccttctcctacatcccctgcgttttgacgctggcgtccaatctttaactttgtaccaggataaggagttccgattggaacaatcaattcattagtttctgtcggctcaggactccagcgataaccacaaattgcaactgttgcttctgttggtccataaatattatcaatatgtgatgcaggtgcagccatatgccagcttttagccatgctctgtaacaaaggttctccacaaaacaacgattggcgtaaattaggaaaagaaccaggttccaattgtcgtgagcgctgaaagtacaaaataatagaaggcactgatgcccaaaatgtc

SEQ ID NO: 5327 - DNA, 696 bp, Photorhabdus luminescens
tagcgtttgtatttgggtctgtcgcagtaattgtcacaatttgattattcccttttatcttagtcggtgccatgtaatctcctgtattcgcattaatactccccaattctgctggagtaatagaccaatttaccgttgccttggtgttggttgtaaatttatgcttagctttcaatggtatagttagttgaagatcattaattctaaatgcagttgatgttggggaaatatcaccaaatagcaccatatccccaggcacatatactttatcaaattcaagataattgctttcaggaaaaagaagatgattaactgcaaataggctaatgctatctaatttaatctttgcaacgttggataaattattttcaacaatatctttaacaacttctgctgttttattaacaaacttttctttaggataaaagtgtattccccaaacaggttcatcttgtttgtcatatctggtgctcattctattatttaattttaattcaatctcatcattagattttacatgaggcgtaatatctattgaaccatcaatataaaaatcaattttagagtcgttccaaccaccacttattgctgaatcgtaaaaaacaccaaatgtttggataaaatgataagagtgaccattattatcctccccagaaaagaataatttttccttctcaggcttaatatacatcccag

SEQ ID NO: 5328 - DNA, 782 bp, Photorhabdus luminescens
ttattaattccccaatcagttcatcccgtagcatgtcaaaagaatagagttcaggattatcaaagcgctgacatacctcaccaaaaactgaatcgaagtccttcccacacgatgcctctgaagaaaaactattccaggttttttgagcatcaactcgtaaagacaatatgtttactgcttgcggacgccccatacccgatatcaacaaattaggcatatgaggatataaatattgcaccgtgttatgcatctgactgatgctggtttgtgatattggaaacccttcttgttttaataaatctgtcaattctcgttgtgagatcggtcttcccaaacatttctcatgcatagaacttgcgttaaaaacaccaagcgctttctctataaacgttaaatccccccgaacatcattttctgccagatgcccaatgacacactgcaaccgaccaggccagggtttaaacaaacaagggattcggaaaaaacgttcctcacccgtttctttccataattcacataggatttggtaacgggtattgcctccatcactgaaaatgtaaacatttccactgtcttccggatctcgcgtcactttcggtacagaatccagtcctctggcacgaacagaagctttaatatcgtcaaaacggggattacggctgaggcgaggattatccgcggttggctgtgactcatccaacgctaataccattggcgtttctgccgtatgcgcaacaacagcactcgtgtgttgatagtggtggtgttgccacaccgagaat

SEQ ID NO: 5329 - DNA, 689 bp, Photorhabdus luminescens
  misc_feature (611)..(611): n is a, c, g, or t
tgcacaatctgtggcgtccagatattaatcgcactcaaggtattggttaaacagaagtaagccagggtatacatcagcatgatcggcgcgaaaatttcacgccatatactgggtttttgcattgcctgatgagttgatgagcttgctggttgaaccagagcgggctggtcgttatccatcatctcttgtaagcattttttgtcctcatctgtcagccagttagcgcgtttgggtgaatcatcaagatagaaccaaacgacaattcccagtagtaccgaaggaaaaccttccagcaggaataaccattgccagccgtgaaggttcatgaggccatccatttccagaatataaccggaagccagagaaccaaacgccatcgtcaccggcattgccaccataaacagtgcgttggcacgggcgcgatagtaagccgggaaccaataagtcagatataacaggatgcccggcacgaaacctgcttcggcgataccgaccagcatccgcaagatatacagactggttggtccggtagcgaacatggtggcagtggaggagatcccccagagcaccataatcgtggctatacagcgtcgcgctccgacaatgttatnataatgtggctgtgatattcgcaaaggcatatggggatatagaacagcgtggccgcaaaccgacttggtgcgttcatc

SEQ ID NO: 5330 - DNA, 790 bp, Photorhabdus luminescens
aagctttaggacaatctgaacgctcaacaacatcagaccaagggagtgatgcattaatgccatacttttccacagtcagaacatcactatcgggataaatatcgctgaatgtattattcacaaacttattattagcgatactattacaatcagagccctgtatcagcaccaatagattcttaccacctctttgcttaagatagtaagttatttcactaccatcatgacggaaaaactgtttatgtgcatttgtatttgagtaagcaaaacctatataacatgaaaaaagcagagcaaatgtcaaaattctctgtcgtaaattaaaataatatgctttcattaatctctcctttaattgacatatacaaagaccacaaattgacgatattgttcctgtcagaaaaaattttaaaatttaaaaacaaggttcagagttttttatccaaagtgctaactaaaacacccatacctttggagagaagaaatgcaaaccactttatccacagaaattacattacccgataattatcatacccacgattttttcgctcttcatcaaagggataaacaaaatatcgctgaaattgtggaacagaataaagttcaaaaagggatgatgtgggatgacaaacctgcggaattaaccatagcgattaatgcaaaaaccgcacatatacaacttaagattgatggtgacacaacaggccctgatgagcgctatctactttagcatcacatatgccagggcttctacagcctgttcatctatttgagtgtgatattaaaagag

SEQ ID NO: 5331 - DNA, 701 bp, Photorhabdus luminescens
  misc_feature (491)..(491): n is a, c, g, or t
  misc_feature (558)..(558): n is a, c, g, or t
tgatgcgtgatattgcctggggatttttttatggcactgttgcgtttgatgatgtactgggcacgactaatcattacggtaacgtcgatttgtacatggggtcattccataaagaatggacccgtgctggccgtgattataaagagaatttcaaatctgacgagctgatggcgattttcaaagccatgatttctgactggaccaacaccgggtttgatcccttcgctgcaccgcaggaaacgggagtggcgtggggacgcaaaaatggcaatgaagatcgtttaatcgggcgtaaacgtgaagtggctaaacgcatggtgggcattccgggtgatgcgccgctgcgttcagatgataatggtcatccggttaaccgggctttcatggatgtaaatcaggagcagcccgtcgtgaaagctgaaccaggctttgaaggtgaactgcatgcgttcaacctgtttggttatctctcccgttcggatatgacctgnaatccgtcagtggtttccgtggtgcgtcagagtctgttttgcccgactaccgaagagtttattcttnctattgaccacggtaatgaccgtgccgaatggttcatccagttgtctgatgaaattgcctgggatatcaaggatggcaagagcagcagcccattggcgaaagtcaccttgcgtgccggggatattgctgcctgccaggagatt

SEQ ID NO: 5332 - DNA, 790 bp, Photorhabdus luminescens
aacggtaaactccaggcgaaaagcctgacattgacacaaggccccaaccagattgatttcaaacgcggaacccttgttcccatgacaggggaagattatggcccttgggaagcgattgataccgggttattagggggaatgtatgccaataaaatccgtctggtgagtaccgagccgggtaaggttgtcaatctgaccaacctgacggcaacccaaggcgacatcagtctgacggcggatggcaaggtgactctgggggatgtacaggccaaaacggatatcaccgttaacggtaaagacattgacatggtgaaaaaaagtcatatgcaagccggtcaacatctgatattgacaaccgatacattgcagagttggggacgaattcgtgccgacggtgatgtcactattaaagcgaaaaccttgtctttagatgggggaaatatcaccgccgggaaccaggttctgctacagggaaagaacagttttacggtgcgtggcacggatatttcaggtcatgacattaccttgattgccaatagttataatacttctgtttcacctagtgacacgtcggaaagcacacaagtattacctattatttctgcggttaatacgctgcgtattctgtctgaacagggaatatcgctttcagatacgctaattaaccgggcgaaaaatatctttatggcgagttatgggtggattggtattaatcagcatttggcggcggatgagatattgatcttcacgctggagggggataaagttgatgggatttcctgaccgccgg

SEQ ID NO: 5333 - DNA, 722 bp, Photorhabdus luminescens
tctgcacccacaaattcaatctgttgaatggtgtggcaaacaaattcagctgcatccgacgttaaaacgggggatggggatacggtgatattgttacgcagcgcttcccgctgttgttgggcttgctgcaacaaggctttttgttgttgcgtgatagtttcttgatccgccgagctgacaggaattgccgcctgtgccagtgcggagattgtcagcagaataagcccagtcaggctgcggtgataaaacggtaattttcccatagatgataattaaaaatttgataatgatattattaaactattctaatgtggtattaatttcccgtctgagtgggcagtgtgaaatgtgatcaatgtctggatctttaatcctgacaatgggaaatcggatatattaaatgctgtaaagtggtgataagaatgaaggtaattttttatacatcaataccaattcttcaagttgcttaatggtattgcgtcccaaatccagcaggcgtgcgatatcctgctgactattctacagcgcatttgttgaccggtaagcgagtaacggagtcagttttcaagcgtgatctgactcgccatcggtgttctaaatagactgtttgacttaagctcgaaaaatttacccctctaaagatcatgcacaccttaataaaagtgttaagtctaaaatagattatctatgtgtagaatttttttacctttatctgcttataa

SEQ ID NO: 5334 - DNA, 798 bp, Photorhabdus luminescens
tgtctcttttgttcataagcactacccaactctggcccctacgttaattgttcgaattgccaggatagttattcaaacctacggacagaaatattcagcaacagaactgcaagaacgaataatcaaggcgccaattacggtgtttaatgcacgtgacgatgccgtttcttttatcgaagaagcaacaccctacctaaaacatcccccagaaaatatcaatcttaacgttgatcatttcgaggtacttaaggaatcaggtgttaacgaattagctcgattcttgagttgattgcttctgcaaacaacacaatgaaaattatttaaggggggttccatgattaaagaaaaaactgccactcatgcgggcagtaccaattttcctttcgttgctctactcgcgttagcaatgacgggattccttgcactgctcacagagacattcccggcgggcattctatcccaaataagtgacagcttggccgtttctgaagcattagctggtcaattcgttacactctacgcaattggctcacttgtcgctgcgattccactgacgacagcaacacaaggttggcgccgtcgccgattactcttgatggcacttacgggtttgttagtctttaatacgctcaccgcgttaacgtctaactatatagtggcacttgcggccagacttctttcaggcatggcaggcggcttaatctggggaatgttggttggctatgcccgacggatggtacccgatcattaaaaaggacgtgcattggctgtagccggtgtcggggaccactggcacta

SEQ ID NO: 5335 - DNA, 709 bp, Photorhabdus luminescens
  misc_feature (506)..(506): n is a, c, g, or t
ttgcccggcaagtttatgaagcaccgcagggagaaacagaaatcctattggctgctatctggagcgagttgttggggattgaacagatcagtcggcacgatagtttctttgccttgggcggccattctctgcttgcggtgcggatgattgagcgcctgcgtaacgtggggttaacgctggcggtacgtgacctatttcaatctccgatgttatcggcatttgcccaaacagtaggccaatcacctccggtggtggtgccggcgaatgtcatcaccccggcgaccacggcacttacacccgaaatgttgccgctgattgagctgacccagcttgaaattgaccatatcgtgggacaagtgccgggtgggatggctaatattcaggatatctatgccctgtctccgttgcaggacggtattctgtttcaccatttgttggccaatgaaggtgacccgtatctattggtcagccaaatgacttttgatgatcgcgccttgttggatcgntatctggcagcagtgcaacaggtagtgaatcgccacgatattctgcgtaccgcctttggttggccaggattatcaacgccggctcaagtggttcggcgcacggcaccattatcagtcactaagctgacattggaccaattgatgggccggtccgtgaccagttagctcaactttttgatccacgtcgctatccgattgatctg

SEQ ID NO: 5336 - DNA, 783 bp, Photorhabdus luminescens
  misc_feature (738)..(738): n is a, c, g, or t
accatgtcttgtttttttctatgtcatttttttgcattataccattgttaatcaaggtcactgtcgatttatcttgtatgcttatattacagtaattaaagtttccatctccaaggtagagattactactttcaaaagtgagcttagatgattcacttagagaaatttcactggctagaaatataaaagcgggaacatcatcttctatttttgttgtttgttttatttcgaatctgctgtttcctgacatgatgagttttggcggtttattggaaacgacataatctataaacataaatacagttcctggatttttgatgcttaaggagcctgaatttttaagaataaaattagtgctttcagagcaccctaaataagcaactgtatggcttctatcaactggatggttttgatcatttagccgatagtctactaataatgttccagcggatacatttatgcctaatcctttgccgctatcagtcattgttccgtcattgtggcgattaaattctggccaataaataggtatattatcggaatcattttgtagtgttaatgtttcactttcagcgttcattgtgaaattagcgccacctaatttatcgaatgaatctgactgagtagatgaaagagtaatagatccagttccataatctttggtatatacctgagaattatttgggtcccattcaaagactgcgctcatttttaacccctcataaggatgaatagttntttcataatcaaacatggttaaaataaatatagttcaaaatgaga

SEQ ID NO: 5337 - DNA, 694 bp, Photorhabdus luminescens
gggatgtactggttaatttcggtgccaactatgaagcatcagtggttgtcagcgacaaggtgaccgatcaagttaacggccattttgagcaggacactcctcaggaattcctgcaacatttatcctctctctataatctggtctggtactacgacgggagcgtgctttatgtattcaaaaacagtgaaatacaatcgcgcctgcttaaacttgaacgaaccaacgcaacggagttacagcaagccctaaaacgttccggtatttgggagccacgctttggttggcgtcctgatccaagcaaccaactggtttacgtatcaggccctcctcgttatcttgaactggttgatcagactacatccgcactggaacagcagtcattgctgcgtagcgaaaaaacgggtgccttgacagtggaaattttcccgctcaaatacgcctcagtggtcgatcgcaagatccagtatcgtgataccagtattgaggcaccgggcatagccaccattctctcccgcctgctcagtgataccaatgtaactgctgttactggtgaagcatcatctccttctatgggagaaagctactccagccgtgcacctgttcaagcataaccctccctacatgccattacttgtacgggataacccggaaacgattgccctgttctcccatttaatcaccgcactggataaac

SEQ ID NO: 5338 - DNA, 769 bp, Photorhabdus luminescens
aagcttgataacgaattttttcgtgggcttgatattcgatctgctttaataaccgggtgatatcttggttaacaccgagtgtgttgagtgtcagcagtggggcgtctttctctacccgctgcccattctgaacatggatagcggtcacccggctctgttcgtatgcctgaattatctgagaacggccagagacaatcaggcgaccggttgcggttgcctgaacatccaacttacccagataggcccagagcaaggccatgataatgccgatactgagcgtgattgcagtgtagcgggcaaaaggtgacggtggtcgttgtgacaatgctaaatgtgtcggtaaaaagtcatagtgctgcggacaagggcgcaaccaggttttaattttattcttaaacgctttaatcatgacaaggcatctcctgttttaattcttgttgtaactgccagagcttccggtactgtctaccgtggttaagtagctgttcatgagagccttgttcgagaatttccccctgtttaagaacaatgatgcgatcacaatgacgtacagttgaaaggcggtgtgccatggtgataaccgttctgccttgggcaatttctggctatttgattgaatgcctgattgtgactcgtcatcaagcgcactggttgcttcattaagaatgaagatttttgggtcagcgaggagagtccgggcataaccagtccctgacgctgaccaccagattaagattgccccgctatgcgatggtggggtctataccac

SEQ ID NO: 5339 - DNA, 691 bp, Photorhabdus luminescens
cctttttcgccccaatgttcgcacattgggattgataaatagcttgtttccctctttcaataaattaaattttgcattttcaaatatagcggaatttttctgctctaccttgacatcattccccaacgatttcagattaatgcctgaaatccgcggcactcttctgacacgctcacctgaactgttcgacgttggtatcaccctatcgtcagattgtcctttggcaaactttgaagtcgttaaaacgccggtattttccacgcgaatactggcatttatctgtagacgatcaaccgcttgtttagcatcatccaacgcttgtagctcttcttcggtcaatcctttgtagaattttttttcagcttccggtattaattcgggatcaatatagctaccggtttcccccgcgcctgtcgattcatagccattaccagacaaaccactaccaccggcaccggtacgatcaggttttgaatcgctctgttttgcccctctaacatcttcttgtacctgggcaattttattttcagccgcagcaatatcacgtttaccccgatattccgccccctgataggcgatatttgcatcattttccgccttttcggcccgttgttgttgcaataagcttcttcttttcttaattctgcctttttctgagccgctgaatatcttgtttgcactggcatgatgt

SEQ ID NO: 5340 - DNA, 786 bp, Photorhabdus luminescens
aagcttcgaataaacggcgctcgtcagaattgaaacgagatggagtatcagcatcgacgtcacgtactcgttgggtatattcatgatcagatgctttacgctgaccctgttctacatcctgatcactgtaacgctgttcttccagacaagagagaatctcttctggtgtttctcccaaatagatacccagatgattaatcaattctggcttaccacactcattaacacgcccatacaatgccatttcggtataagccggcccacgatgaactaaagaaccgcctgagttattacagatgcccccaatcacggaagcgccaatgcaggaagaaccgataactgaatgaggttcacgtcccagcggcttgagcgcacgttcaagttgccataatgtactgccaggtaacgcaactacctgattacactgttttaaaatctgaattttattcatgcgcagcgtactaataataactatgtcacgatcgtaacccttaccattcggggtagaaccttcggttatacccgtgttggccgcctgcattaagataattttatctgcttcaacgcagaccttaaacacatgccactgttccaccaacgagccgggaaatacaacggctaaagccgcttccctgcccgcaccgaaagcctttacgataacgttcagttctatggcgagcagtcaagatatgagcattaccgacaatattggtcagggtagtaatgagtcgttgatttcgagaggtctttgcatcacttatagcctctcccttatatacaatccca

SEQ ID NO: 5341 - DNA, 706 bp, Photorhabdus luminescens
  misc_feature (653)..(653): n is a, c, g, or t
ataaacaaggggctgactggagattttaattctacgattgccaagatgatgttaacaaaacacggctattcagataaacaagaaatcgatcaccggttctctgatggttctatgtctccaaaaccaactattatcaggctcgttggagtcgagccagggcaatgacggtagcagttgacctgccgattcccgcaaaactcgtacctgtatttacaaaagaaaatgttcgttaccgaggtgcacacggaggcaggggcagcgctaaaactcggacatttgcaatgatgagtgcggttagggcttatcaagctgctgaatctggtacaagtggggttattttatgcgctcgcgagtttatgaactctctcgaagaatcatcaatggaggaagtgaagcaggcgatccgttccattccttggcttgatgactatttcgaaattggcgaaaaatatatccgcacaaagaataggctagtcaactatgtgttctgtggcttaagacataacttagacagcatcaaatcaaaagcgcgtattcttctggcgtggattgatgaagctgaatctgtatcagagacagcttggaaaaagttacgaccgacagtacgtgagtctggttctgaaatatgggtgacatggaaccccgaaaggacngaagcgcaacggataagcgacttagaaagaaaccaccgaaaagctcaatcatt

SEQ ID NO: 5342 - DNA, 770 bp, Photorhabdus luminescens
  misc_feature (627)..(627): n is a, c, g, or t
  misc_feature (635)..(635): n is a, c, g, or t
aagctttgcgcctgatggaaatggcagagcgttttaaactgccaattattactttcattgatactcctggtgcatatcctggggttggtgcagaagaacgtggtcaatctgaggcgatagctcgcaacttgcgtgaaatgtcccgcctgtctgtgcctgttatttgtactgtgattggtgaaggtggctctggtggtgcattggcgattggtgttggtgataaagtgaatatgctgcaatatagtacttattctgttatctccccagaaggttgtgcctcaattttgtggaaaagcgcggaaaaagcacctttggcggcagaagctatggggatcactgctcctcgtttgaaagagttggagttggtcgatactgtgatttcagagccattaggtggtgctcatcgtgactatgaagcaatatccacgtcgttgaaagctcagttgttgattgacctggcagagcttgatcatttgacatctgaagaattagtcaaccgccgatatcagcgcttgatgcaatatggttattgctgatatttgaattaattgtttggataagggatggtaactgactggaaatgataaatttcagtcacttccatcctttactgtttctgcttctttntatcattncatattgttaatgaaagtagtgaagaacattatctgactgacagaggttctaaacttactaaggtatatacccctatggattcaagatgcatcgcggcggcagggagcgaatccccggagctagatactatgtga

SEQ ID NO: 5343 - DNA, 688 bp, Photorhabdus luminescens
  misc_feature (604)..(604): n is a, c, g, or t
ttaatatattaaccactgtaattatcgtatatataaccatctattatagctatatatctgaattttgctatttttgaatgtcaaatttattattccaactgcctacattacatcaatattaaaagataattgcatgatatattaggcactcatcaataaacccaacattatattactttatatccgtcatctttcaagttgcccctttgttggctgcactctctcaccccggtcacatagttatctatgctctcggggattcgctccctttccgtcgcgatgcatcttgaaatctattgggtatacccctaaatctaaaatgatttaaaattttcccttgtgaaaatatttttaatattaaattcaatttgaaactattaaaaaaaataactattcagatattctcaacaccttaaatactcggctaacagtaaaactcaatagaggatgaacaagagatcaaatcaattatacccgttatctttcaagttgcttctttgttggttgcactcgctcaccccggtcacatagttacctatgctcccggggattcactcctttgccgtcgcgatgcatcttgaaatccatagggtatagaccatanataataatcagtttctccattgatttaaccttaaaatatacgtcattaacgccttaatcgtcattttaatttccttgaagtaca

SEQ ID NO: 5344 - DNA, 820 bp, Photorhabdus luminescens
  misc_feature (1)..(1): n is a, c, g, or t
  misc_feature (6)..(6): n is a, c, g, or t
nactgnagggcactgtatcctgggcttctcgagagtcaccctgcacgcatgcaagcttgggggctggaaccagaaagtcgtctgagttgtcaggctaaagtttctgacgaagatttggtggtagaaattccaaaatacaccattaaccatgcccgtgagcactgattggcaggagaaaaataaatgagcctgaaatggtctaacagccgtgaaatcggtgaagcgctatatgacaaatttccagaggtagatccaaaaaccgttcgctttactgatatgcatcagtggatttgcgagctggacgattttgatgatgtagctgagaaatccaatgaaaagattttagaatcgattctgctcgtttggttggatgagtttgaataacaaatagcattaatttgttatttatctgtcatcgttttaagttaggctgctcttcaatgaaaaactggctttggccggtttttttgtagggtgaatatctggcaggcgaagaattatgtaggtaatacccaatggatttcaagatggatcgcgacggcaagggaacgaatccccgggagcataggtaacgatgtggccggggtgagcgagtgcagccaacaaagaggcaacttgaaagataacgggtatagaagcttgaataagctcctcactgccatcaagcggtaataataagaggtgagaaaagaatgactaaacaaatcatgccaataacactgtcttatgaaccagcagcagcttgctggggtgaaaaagcgctgattagttccagtgagcaaggggtgatgggtcacctgcgtggtgaaagataattaag

SEQ ID NO: 5345 - DNA, 777 bp, Photorhabdus luminescens
  misc_feature (689)..(689): n is a, c, g, or t
aagcttagtcgcggctgccggagaatttgctgcggctggcaatgtcggtgaactaaacaaaaccacgctaacaaaagccgccggcaccgacgcaattaataattttagtctcaccttggacggtataaaaaaggtatttaaggcaggcgcggctagtgctaccgtcagcccagaaaaattggaagagctgcaaaaagcaactgatgatttaaaagaggtcgcaacagatacgctaattaccggggcatcgctaggtgcgacagtcggagccacactggataccgccgccgcggtcgtgccacacccggtagccaaagtggcactcaaaggtctgtcattggcatggaaagttaccggcattgttcacaccgcagaagaattaagcgagctcgcagaaaaacataaggatctggtttctaatgagctaggacaagaattaaaaagggaggtcaccgaggcaaaccaaattaggcggggaaccattctcgcaaaagttagagaacacggtttgataaaatagtctattaaatgcaatagtccttattcgccgaagcagataaggactattttgttttgaatcatatgtatcaatcacgaccagaattaacacaagattcttaacatactgatcatactaatgaagtctactctcaccctgctccggcaaatatcttcatcttgctcatcangatcttcgaaagtagtgccccaccgtcataattaatgccattttttcacctagatcaccaactgttcacctgggcataatcagttctg

SEQ ID NO: 5346 - DNA, 701 bp, Photorhabdus luminescens
ctggttttattcgctctctgctaggtaaagcaatgcgtttgcgtgtcgtaccggaactgactttctcctacgataattccttggtagaggggatgaggatgtccaatctggttactaatgttgtaaagaatgatgaacagcgccgggcttctacggatcacaaagaggagaagtaatggggcgtcatcgtcgcggtcgtgatatacatggtgtgttgttactggataagccgcaggatatttcttctaatgatgcgttacaaaaagtaaaacgtattttcaacgctagcaaagctggtcacactggcgcgttggatccactggcaaccggtatgctaccggtttgccttggtgaagcgacgaagttttcccagttcttacttgattctgacaagcgttatcgagtgatagctcgtcttggtcagcgaactgacacatcagattcacacgggcaaatcatcagtgaaagggcaatccagctaagtcaggttcaacttgatgcagctttggataaattccgtggtgataccatgcaaattccttccatgtattctgcactgaaatatcagggaaaaccattgtatgagtatgctcgtcagggtattgaggtagaacgcgaagcacgaccaattacagtctatgaattacagtttatccggtgggaaaatgatgaactggaattggaaataccactgttcgaag

SEQ ID NO: 5347 - DNA, 763 bp, Photorhabdus luminescens
aagcttgggggctggaaccagaaagtcgtctgagttgtcaggctaaagtttctgacgaagatttggtggtagaaattccaaaatacaccattaaccatgcccgtgagcactgattggcaggagaaaaataaatgagcctgaaatggtctaacagccgtgaaatcggtgaagcgctatatgacaaatttccagaggtagatccaaaaaccgttcgctttactgatatgcatcagtggatttgcgagctggacgattttgatgatgtagctgagaaatccaatgaaaagattttagaatcgattctgctcgtttggttggatgagtttgaataacaaatagcattaatttgttatttatctgtcatcgttttaagttaggctgctcttcaatgaaaaactggctttggccggtttttttgtagggtgaatatctggcaggcgaagaattatgtaggtaatacccaatggatttcaagatggatcgcgacggcaagggaacgaatccccgggagcataggtaacgatgtggccggggtgagcgagtgcagccaacaaagaggcaacttgaaagataacgggtatagaagcttgaataagctcctcactgccatcaagcggtaataataagaggtgagaaaagaatgactaaacaaatcatgccaataacactgtcttatgaaccagcagcagcttgctggggtgaaaagcgctgattagttccagtgagcaagggtgatggttcacctgggtggtaaggtaaataa

SEQ ID NO: 5348 - DNA, 683 bp, Photorhabdus luminescens
tttcctgactgctctgttgctgacagttttccaccaccaaataatttttggcaggtaaccgcccctgagacggaaaaggggctggcaaccagacaagatcatgatgctttatttcggacatatttttggttccttcatttccaacggttctttgattgggtagttcggactaccgtaggtgttacacgaggtggtaactttgacctgatcacaaggtaagaaatgcactgtaataccgcaggtgcgctgcccggtataatcgggcaacggtactacctggctatgctggcgcttttgggcattaatcttgtccctccacgccaaatatttttttctatctgcaaaaccgggaaacccccccatgtccccaacaccagtctcccaatccaccttaaccgtcatccccggccgccacttatctggagcccgatagcagcaaccgccaccaccgccctgatacgggccgataatatcgatacccggttgatcatccacagtgaaccggttaatcgcccacttagtatggttaatggcgataatgatgcctgcctgtgccggaaattggctacaggcgaccagcagcagagataaaactgccagcctcaattgttgttttttcatcttctattccttcacattagtgacaatctggacttgaaatgccggtatgcattacttcggaa

SEQ ID NO: 5349 - DNA, 771 bp, Photorhabdus luminescens
  misc_feature (762)..(762): n is a, c, g, or t
aagcttatctatatcgccatcatccaaaacatcatcactacattgtgtagagataaaattagccaccaccgatgatatcgttgacgattgacgcaaaaccttatttaataaaccaatggaaataatattagggggaattcccgtattcaattcctgacttttttcatattctccttgagaaacaacattagcatcctgactaacagaaaaagctttaaagtcatttttattactcatgagttctccttaaggaaaaaacttatgttttcattaaataaaactttgaattaatgaaaataaaaatatccacttgatcatcgtatataattttcagatcgcatttcaataatagcccttttttgataaggagtgatgaaatatttttataacttagagaaattaattattttcttatagttgatgccgttaatatatcaatgcctgaagccaaatttatacctaagctattcatttacattcagcatccgaaagtccctctatttgaactattccccaaaattcaggtaagcaaataaaataagctaccatattttaatctgagttttgtgatgcgcctctcataataaaaaaccgccagttccaataggattgatcagcttataaaaacattattgaggatttattagcttgaattattcagaataggtctattcttaatatgtggacaaattctattgtccatacttattaaacctactaagtaaggggaaattatatgccatcaagaagagacgtcatagntggaggatt

SEQ ID NO: 5350 - DNA, 682 bp, Photorhabdus luminescens
atgtaggtaagctgctagcttttttgaaagaacccgatcctccgaaaggttttcgtgatttactggataagctaccgaaatttaagcaagtccttaatatgccaactaaacggcttaatactgcgccttgtcaggaacatgtttcggttggtgacgatgtagatttaacccgtattcctatcatgcactgttggccagaggatgctgcgccattgattacttggggactgacagtaactcgtggcccgaataaagagcggcagaatcttggtatttatcgccagcaagtattaggtaaaaataagctcattatgcgctggctatctcatcgtggcggtgcgcttgattttcaggaatggtgtcaggcacatccaggagaacgtttcccagtggctgttgccttgggggctgatccagcgacaatattgggggctgtgacgccaattcctgatacattatcggaatatgcatttgccgggttattaagaggatataaaacagaagttgtgaaatgtctttcaaataacttggaggtaccagcaagtgctgagatcgtattggaggggtatattgagcctggcgagttagctccagaagggccatatggtgaccatacgggctattataatgaaatcgatatgttcccggtgttcactgtgacacatattactcagcgccatga

SEQ ID NO: 5351 - DNA, 779 bp, Photorhabdus luminescens
  misc_feature (51)..(51): n is a, c, g, or t
  misc_feature (702)..(702): n is a, c, g, or t
agctttcgggtttaatatctagattagctccctccaatataacgagggagnatattaaggaatagagtcgtgtctaaagaaaaatttgaacgtaaaaaaccgcacgttaacgttggtactatcggccacgttgaccatggtaaaactaccctgactgctgccatcactactgtactggctaaaaccttcggtggtaacgctcgcgcattcgaccagattgataacgcgccagaagaaaaagcgcgtggtatcaccatctctacttctcacgtagaatatgatacgccaagccgtcactatgcgcacgttgactgcccaggccacgccgactacgtgaaaaacatgatcaccggtgcggctcagatggacggcgcaatcctggtagttgccgcgactgacggtccaatgccacagacgcgtgagcacatcctgttaggccgtcaggtaggcgttccttacatcatcgtgttcctgaacaaatgtgacatggtagacgacgaagagctgctggaactggttgagatggaagtgcgtgagctgctgtctcagtacgatttcccaggcgacgacacgccagtcatccgtggttctgctctgaaagcgctggaaggtgatgcagagtgggaagccaaaatcatcgaactggcagaggccctggatagctacattccagagccagagcgtgctattgaccagccattnctgctgccaatcgaagacgtattctctatttcaagccgtggtactgttagtaccggtcgtgtagagcgcggtatcat

SEQ ID NO: 5352 - DNA, 704 bp, Photorhabdus luminescens
tctggataaattcacgcagtttggcaacttcctgctgctgtttcagcatcgcattgatcttgtcgccaatacctttcgcagccatgcccagatgcgtttccaagatctgaccaatgttcatacgtgatggtacgcccagtgggttcagtacgatatctaccggagtgccgttttcatcgtaaggcatatcttcgatcgggttgatcttggagataacacccttgttaccgtggcgacctgccatcttatcaccaggctgaatctgacgtttaaccgccagataaactttgacgattttcagcacacccggtgccagatcatcaccctgtgtgatcttacggcgtttagcatccagttttttctcgaactcagctttgagttcgtcatactgttcagccaactgttccaactgattctgtttctcttcatcagccagacccagttctaaccaacgctcacgaggcagtttatccagtttctcagcttcgatgccgcctgcaatcaaaacagaacggatacgtgcaaacaggccagcttcaaagatttgcaactcttctgtcaggtccttcttagcctgacgcagctgcatctcttcaatttccaaggcacgtttatctttttctacaccatcacgggtaaatacctgtacgtcgatacccgtaccggatacgccatttggtacgcgcagagaagagtctttaact

SEQ ID NO: 5353 - DNA, 782 bp, Photorhabdus luminescens
  misc_feature (708)..(708): n is a, c, g, or t
aagcttggtgcgataccataacgaaagaattgattcacaaacttaactaagactactgcatgattaatacagaaaccttcgacacccacacgcccatgatgcagcaatatctccgtcttaaagcacagcatcctgatatcctgctgttttacagaatgggggatttctatgagctattttatgacgatgccaaaaaggctgcaaaattgctggatatttccctgaccaaacgaggtcaatccgctggcaatcctatccctatggcaggcgtgccacatcatgcagtagaaaactatttagctaagctggttcaattaggtgaatcagtcgctatctgtgagcaaattggcgatcctgccaccagcaaaggcccggttgaacgtaaagtcgttcgcatcgttactcccggtaccgtgacagatgaagcgctattacaggaacggcaagataatctgctggcggctatttggcacgataatcaaggctttggttatgccacactggatgtgacatctggccgcttccaaatatctgaaatgatagagctggaaacgatagccgctgaattgcaacgtagccgtcctgttgaattactctatcctgaaacgtttgagcatatggcgctaattgaaaattttcatggactgcgccgtcgccctttatgggaaattgagccgatacctgaaaacagcaattgaatccgcaatntggtacccgtgatcttgtccgcttcggcgtggataaagaactcttgcttttctgccccgggtttccttttcaat

SEQ ID NO: 5354 - DNA, 704 bp, Photorhabdus luminescens
  misc_feature (553)..(553): n is a, c, g, or t
atctgcacgctcaacaagagaaaggattactgcgtttcctgacgtgtggcagcgtggatgatggcaaaagtactctgattggacgcttgttacatgatacccgtcagatctacgaagatcagctttcaacattgcagaatgacagtaaacgtatcggtacccagggtgaaaaattagatctggctttattggtggatggtcttgctgcggagcgcgagcagggtatcaccattgatgtggcttatcgctatttttccacagaaaaacgtaaatttatcattgctgatacgccgggacatgagcagtacacccgtaatatggcaacgggggcatcgacctgtgatctctctattctgttgattgatgcgcgtaaaggtgttcaggagcagacccgtcgtcacagttttatcagtacattgttaggtattcgccatttggtggtcgcggtgaataaaatggatctgatggaatatcgtcaggaggtttttaatcagatcaaacaggattatatgaatttcgctggccaattgcccgacaacttggacgttcattntgtcccaatctcggcacttgatggcgataatatcgtcactataagtcgtaacatggattggtatgaagggccaacgttgttggatatccttgacacagttgatgttaagaaggacgcctcgaacagttactgcgttctccggacagtatgt

SEQ ID NO: 5355 - DNA, 786 bp, Photorhabdus luminescens
aagctttaaaatcattcttatgactcatgtactttctccttaaattaaataatattattttataatcaatatattgaattattttaaaaataactctcctgcaattcactccaattaaagtctagttcagaaaaataatatagttcaatattttggaatcgaaaatataccttaaaaatttacatttaacatctggaaattatttttctcttattctttctatttcatcccgtaactttttctgttttaaatttcaaactgaatcttctggcatttagacaaaaacatctaagcggtaatgctcaggaatatcataggattccctatctttgtagaaaacacgcgcattgttattatcgatacccttaagttgccagttctgaaaacgtgtcgataaatgcaagtgctgagataccatcatacacacctcatcccatacctactctatagcttgtgatattacagttgatatatttcacccataaaacaactacagttaagcgatataatacttgccacagtcccatgacgggattaaggtgactgtgatgaaaataatatccattgcatcatcgaaaacgttctgagaaaaacacccagatgcaaaacaaccactaaaggcttagtttgacgaggcaaaaaatgcctcatggaaccgactacttatcaaaaaatccacacaattttgttctatatactaaacaaagtaaccaatttataacaatttgtcgcggagtatcttacctgttataagttattacattacctgctcatttatgagattag

SEQ ID NO: 5356 - DNA, 699 bp, Photorhabdus luminescens
tgcaaaatggttggctgagcaaacaccaattataggtatcggggtggagactgttggaaccgacgcgggtcaagccggaaaatttgaacaaccttaccccgtacactggtactttcacggggcgggaaaatatggcctgactcagttgaagaacctagcaaagttaccgccaacaggtgcagttatcatgatagcgccgcttcccatcgttggtggttcaggaagcccttgcagggtgttggcacttgttgaataacacaaagttaatttgcgaagagtttttaaggaagagtcgatgaattcaaagtactgcttgttactaggaacagagaaaaacagatttcgtgcattggttgccacggctagagcaaccaacatgaaaatagcgatcatggccccaagtggttatgttaatggaaaccgttacgctgatctagtgattgacggtaacccagaaaacattgaacaagctctggctgcagtacagacctttgccgagcgagaaggaatgcaaccgggcgcagttgttccattgacagaaatgacgatagccccgggggctcgtatcgctcagtactataatttaaattatttgtctgaaaaagcgctgacattaacccgcaacaaatttgaaatgcgtaaggctgcacatgcaggtgggttgaacgttccgaaagttgcacgtttaatcaccttgag

SEQ ID NO: 5357 - DNA, 790 bp, Photorhabdus luminescens
aagcttagcgaactgttaccggcgacagcctttgtcgaacacaccccgacaggtatgtatcgcgtgggcaagggcatttcctactctgaaacggccgcgggcggatcgagcagtcacggtcagtcccgggcacaactgattgcggcagcaggtacacagtccttgctgaccgatattccaatcgagaagaccctgacgcataccttgcagacacgcgggtacgatgtacacaacccggcgttgctctcacaagcactacgggatagcgagctcaaggggacgctggcaccaatgagtggcgattctgagcctcgtcaggtcagtgccaatatccatcagttcgccgccgatcctgtgttgttcgccaaatccaacactatcaataccgagacattaatcaggtcggggagtttcccagcagaagggaacgcccagctagtgaaaatcgaatcaggcttgtacgagctcgaatacactgatcgaagcgctaatgatgatgtagcagcaggcgctaacagcatacccgcgtattttctcgactacgacagcgccgatcaggccaatgcgtcaccagcctacgtagatattcctaagcatgcgatcgcggagagttttctatttaccgggacgctatcgggtggctcggcggtagtgaccagcctcgatgccaatacctaccgggtctaccacgatggccgagtcaacagttcactgctatacgataacgtggtgatggcagcggacacaaagattaccgggagctgcaccaccacagcttgccgggggtact

SEQ ID NO: 5358 - DNA, 715 bp, Photorhabdus luminescens
  misc_feature (707)..(707): n is a, c, g, or t
aaccaaaaccagatactaagccgtcggcaccggcgcttaagtctaaaccagacattaagtcagagtcgaaacctgaagttaaaccgattgaaacagccccgcaagggcaggcttatatcgtacaactgggtgctttgaaaaatgccggaaaggtagatgaaatcgttgccagactgcgtttgtctggttatcaggtttatacggttccttcatctccggttcaggggcaattaacgaggatatatgtcggtccaaatgcgtctaagcaacaacttgactcggcattatcagaattgaaaagtttgactggattacaagggcaggtaaggagttacaggccgtaataaaagtgggtaatgcctatgtgacaaatctatgtgacaaataggacaactatcatgaagaagtaaatattaagtgactgcggcgatgataattattcaaattcgtcgtcttaattattttcagtgggataggaaatctgctacgcaaacgttttcgttttctgttagaatgcacctgaaacggatgccgaggtgtctattttggaattaaaacatggtttggattgattacgctattatcgccattattggcttctcggcattagttagcctgattcgtgggtttattcgtgaggcattatcactgggcacctgggggtgtgctttctttgtagcaagccatttctatacttacttagcggnctatttac

SEQ ID NO: 5359 - DNA, 797 bp, Photorhabdus luminescens
  misc_feature (696)..(696): n is a, c, g, or t
  misc_feature (756)..(756): n is a, c, g, or t
aagcttggcctcagctgcttatgatcaaggccgaattgccgcccaagcgatgacgaaaggaaacgccgaagttcatctgattgaagatatcccaacgggtatctataccattcctgaaattagctctgtaggtaaaaccgaacagcaattaacagcaatgaaagtgccttatgaagttggacgcgcacaatttaaacatcttgcacgcgcacaaattgcggggatgaacgtaggaagcctgaaaatactgttccacagagaaacaaaagagattcttggcattcattgtttcggggaacgtgcggctgaaattattcatatcggccaggcaattatggaacagaaaggtgaaagtaatactatcgaatatttcgtcaatactactttcaactatccaactatggctgaagcctaccgtgtcgcggctttaaacggccttaaccggctattttgattgcccgtaataagtgcccattttagctctaatagcctctgcaagttgctcatagcgaccacgcagaggtgaaccaggacgataaatcaaaacaacagaccgcttaggttcagggctgttacactccagatagcagacgccatcacgttttttctcttgtggcactgccaaatcaggcaataaggttattccactaccggcagcaaccatattacgcagggtttccaaactggttgcacganaatgggtatcttccttcgcaccagcctgaaaacagaaccccattgcctgatcacgcaagncatgaccatcttctagcatcaaccaattttcacctgccaaa

SEQ ID NO: 5360 - DNA, 708 bp, Photorhabdus luminescens
  misc_feature (586)..(586): n is a, c, g, or t
tttaaataggttgtgtaagatatattgctgaaataataaataaggtaataacaaagctaccgcactaggttattggctcccagaactccatagaatgttataattttatctactgttttgatttttcaatgcttttgtctgctgtaataaaaaagcaataaaatataaggttttttaatgaataacaggggaggttaaaccgtcagactcgccgggtcaagtataaataaaatttatttgtttaatgaatttgtagaataagcttagcagaaatctgtattaccggccatgaagtggtagccaaataaccaagcgtaagccgccgagtgggctgtcttcagcacgaacccaaccgcggtgttggttaatcgcggtttcaacaatggctaagccaaggccagtgccgccggattcccgatcgcgggcttcgtctgtacggtagaaagggcggaatatgtgttcacggtcttccgggttgacgcccgggccgtcatcatcaacggtaatagtgatcccttgattatcggcgtgaaatgcgaccgcaatatggtggtgggagtagcgtaaggcattacgcacgatattntcaaaagcactgccaagtgctaatgggttgcagtaaattggccaagaactcggtggtaaggctgcttcaagggttttatccatctgttcagcttcgaagcgagcattgtcaagaatatcgtt

SEQ ID NO: 5361 - DNA, 773 bp, Photorhabdus luminescens
aagcttagtcaggacattggcaccacccaccaataccgaggaaacacggccactgcctttttgggtcatgacattaaaaccaccggcacctaaccagctcgctctacccttgcctatctgcgtgtgcgtattgtagccacctagcatcaccacccggctattaccattacctttatggatcgagatattacccactgccaaaagatgagccagaaatcgtccatccccaacccgcaccacaacatttgccacccctccggcattaacatccatttctccacgctgactctgatgaacaaggacgttagcagcaccagcaccgttaaaattaacattgccttgcgtgacgctggatataataatatttccaccgccagcgccactaaattgaatatcaccggagctctcaccattacgggcaaatgagttcacaagttcttgctgacgatactcttcggtatgcgctaatcgatcagaagcacgacgtattgttgtattaagactatattgcagttgacttagtgtgcagccacccgcatttatagcgcgataaccgttcgccagcgaaatatcttcatttgccaaattaccggtatgatcacccgctttgtaccacgcgctggccaaatatttaagttcctgcgtaacaggatcattttccaatttaactaccactactttagtgcatgattccagatacttggcatacacatacgtatttgggtgacgattcgaactcatcgcgcaacatcaactttctgacgatcagaaaa

SEQ ID NO: 5362 - DNA, 691 bp, Photorhabdus luminescens
tgcggatgttacaaaaacaggcccaccagttgcgctggcaggccccggtctacctgtggcaggtgtgtcacagtacctggtctcaggaaggtcgtatcactcagaccgtcggctgcttttttcctgaacgctgtaccccggatatcgtggcgacacagttacaaacgttggttgacccgttgcgcgagcgcgggatgcagcaactgttggagaagacggcccacgattttctttgtcgtctgtccgcgaacttgaaacaacaggggattgcgcactggcaacaggtcctgacgccgtggttagcggagtatggtgatgtggtgtcgctgcggggtttgatgttcagtttgccgcttaaagcgcagacgactcgcctcccgcagatctggctgcccgacacggcatggcagggggtgttggagggcagtcgttgtttccacggtcggcgggtgggcatgctccacacacagaccgtttgtcgtggcctgatagtgctgggcttgttatggggggccggaatgatgctctcctttttcaccaaccgtgaccagctagctgtggtgcaggcggcggtcactgacctgaaagctctaccggagaattctgatgcccaatttgatggccttaaaggcgctgcgtaacgaggtggaccggctgaagaccgggctgacacagtgtaccgcggatgaga

SEQ ID NO: 5363 - DNA, 775 bp, Photorhabdus luminescens
  misc_feature (696)..(696): n is a, c, g, or t
  misc_feature (748)..(748): n is a, c, g, or t
aagcttgttatacaatataggcatcaatttaaatgacaatcattattacgccgcaaaaaactatgattatagtacgataaatacagataataataatttccgaaagtaaattacagatagtgaaaaaatatgtacaggaacatgggctaaatttggaaaaatgtgttgcctatggtgattctggctctgacatccccttatttaatgcgcttaccaatacggttgccataaatgggacggataaaatacgggaaatcgcattaatccattatgaaggtaataatctatggcaaccctattagctcatacggaaaaaaatcagtgatgagaatatagctatgagttgaaacgccctttcaatttataccgattaccgggaaataacagactggcactggaaacaatgtaatgaatcgaccaagttcggcgactaattaataaacaaggagcccctgactcaatttgcaacaacttgcaggatcgaggatcaccagcaatcgcttccacaatgtgttcaccttccgttagaggtgcaatcattgacaaataatcgtgtggcgtaagtttcgtaaaatcctgttgcaaataatcaggcaccgcttgagcattgacataacgatcttctatttgaacaggaacatcgttttcataatggacaataaccgaatgataaatcggcgtaccaacaataatgtncaattcagcggcctgtttcacatccgcatccagctcggataatttaatattntacagcgatgctgatgagaacgagcta

SEQ ID NO: 5364 - DNA, 691 bp, Photorhabdus luminescens
  misc_feature (561)..(561): n is a, c, g, or t
  misc_feature (678)..(678): n is a, c, g, or t
actatcaggaactttgtctggccgccaatcgccgggtaatccgtccctgttgtaacacgttgcatgtcagcctgttttttgatggcaccggcaataatttatataacgacctttatcaggctgttcctaaccatccgaccaatgttgtccgtcttttccaggcaaccattggggcgggttatgccggaggggcatcaggtaagccgttactggataatattgagagcatcggaagaaagtactttaagtattatattcccggggtgggaacccctttcccggaaattaatgagctggattacagcaaattggggctggcggttgctagcgggggagaagaccggatcaattgggcattactgcggttgattgatgtattaaagcgcgtattggtaaacgacaaaattgatgatgttgcttgtcaaaaatccctgaaagcgatggcaaccacatggaatatgctggagttgggcggtagcaataaccgctatgaggagttttataagcagtttgcgagcttaaaacgtgaactgaggatagcccgcagtcagcccgggcggngtaagtgtaagttgttgggcatgaaattgtatgtgtatgggttttcccgtggggctgcggaggcgccgacttttgttaactggctgactgaactggttccgccgtcgagagaagcangccaaaaaccgca

SEQ ID NO: 5365 - DNA, 758 bp, Photorhabdus luminescens
aagcttagtggtccggctgatgatagcgatcgaatcttgcgctgttgcatccagtcccttttcacccaaggtgatagcgccttttttcacttccaaggccgctaatgcgccatctttatcaaataccggtttaccggtcgataaggtgacagccggagtattaacaaagcgacaaccattacaggtcataccgttcgggttaacaatgaagacattagctttctgccctgcaacttccaacagcccttgcagatttgaggctaaggtacccaccacttcattaataatcagttcagccgattgaccgttgaagtgagggttcgccccaatttgtcccgccagtacggattgggtagcttcggtagcattattgagcaccagcccggaagccccaacattaaactcctgataacggttatgtgaaacaccacgggcgttaggtgccgcaatatgaataatagggtgattgtttttcgaggtgatccgagtttgcttatccgccagtttaatccctgggacttctccttctacttctgaggcgtttatggtcagttgaggagcatggcttaacgcacatgcaatcagcgcagaagtgactggcgtatatttcccttcaactgagttatacctccctgacggtgaatgtaactctgcgttgtttttgacaatggcagtcaccccttttgccgaccaagttgcctcagtatcaataatgtcaccaccagcattaagggttaaattattgccggcagtgatgt

SEQ ID NO: 5366 - DNA, 673 bp, Photorhabdus luminescens
  misc_feature (618)..(618): n is a, c, g, or t
atcagtcagttggatgcagtggttgggggcgagttgatgtcatgatggatactgatggtgatttctatctgttggaagtgaatacctctccggggatgaccagccacagcttggtgccgatggctgcgcgtcaggctggattaagtttttcacagttggtggtaaagattttggagttggctgattgatatgtctcaagcggccctgaaagtgaggggacgggataatgaaagtagcagttcccgtcctagtaacggctcttacctggcagggcttatcttcttcctgatggtacttgggaccattatttggggaggtttggccgtccttaactggatgaaagatgctaacagattgcctatttcaaaactggtggtaacgggtgagcgtcactacacgaccaacgatgatatccggcgggcaattttgtcattagggcaaccgggaactttcatgacgcaggatgtgaatatcattcagcaacaaattgaacggatgccgtggataaggcaagtcactgtccgtaaacagtggcctgatgaactgagaattcatctggtagaatatgttccttatgtgcgctggaatgacacacagatgctggatgccgaaggtcangtattcagcattccggctgaatggggagctaaagggtattttccgatgctttata

SEQ ID NO: 5367 - DNA, 782 bp, Photorhabdus luminescens
  misc_feature (762)..(762): n is a, c, g, or t
  misc_feature (779)..(779): n is a, c, g, or t
aagcttggtgaaggagaagtgatcttatgagtaaacaactggtggttgatggcgacactttgctattcgaacccttgttcggtaaccggcaggtcactattctggggccggcaatcgtccggggcagtggtcacgttaagatccaaggcaaaaaaatcgtaatggtgggggatgaaaaaaagatacagcttcaagcacaatatattactcctagccatccaatacccggcatgggtatggtcaccattgctcaattggatgtcggtcagcaggtaaatttttgtcgtagccctgccacggtgattgtggttggacagcaattcattgcccgttttaccccatcacagccggcaaataatccatcgagtggccccgatataaccgcacccagtatgggaaaaggccgatttattgccagtcaatatgctgtcagtgctggataaataatgttttaatttatttttaaatagtaatgatctcctgaaaaaatattaaagttatattcaaataacaggtggtataaatatggaacagaccgaattagaaaataaacttaccgctatggtatcggatacgacttttaaacttgatgaaagaagtacgcgggatatattaaactggattcaggaatatacgcgaaaaatcccttttgaacaggggaaagaaaaattctggcatagcttctactttattcacgaaaatcatccccagcaattatgcggtatttaccaaaatgtgaataaagacaattggtcttttacncgctcatcaagcttttntaa

SEQ ID NO: 5368 - DNA, 694 bp, Photorhabdus luminescens
ctttaagaattaacggtaaagtttccgcggtaaatgagaaacgctgacacaattgtgcaagattaactttctgagcggcattatccggtaaacattctttcaacatagattctttatccacccgtgtagctaccggcatctcaatttgcaccattgataaatgtttaatccagactaatgcgtctcccggctctactaaacaaaccaccggtaatttgggttgatgcagcaaaatggataataggttattcaatgttttcttttcatctgcaagtaaagaaaaatgacgaattaataaacaagcattatgtaaccgtgcttctctcactgcatctgccagcaaactagctattacagttaaattctcttcctctggcaatcgagctaaatccaaaattagagtactgatgctatgaaacgccataatattgctaaccgctaactctctggcactgccctgttttcctctcagtatcaccaacgggcgaatttcatcagtttcattcaataatatcttttcaaatgaatgataaagagttgatggataccaaacgttcgaagtaggagaatgccaataagcacaatttattaggggcggaaaaattacctgttgtcctgataaaaaatgccagacggcgctgtgggtaaaaattgcgtttgtaccagatagcttcttcgtggttattgagccgta

SEQ ID NO: 5369 - DNA, 772 bp, Photorhabdus luminescens
aagctttggcttgtggaaattgtctggtgatattattccggtactcttcctggatataagaggaaaggccgccacgaataaacagggcagggcgaggccatgtagggatttcttgccagccgatgatcttttcatactggttaattaataccggtaaattgaatttccattccccctgatggaatgatttcagtaaaaactgaatgacaccttcttcctgaatattttctcgcataatcttagcggcgtcttgacgggatttaactccggctgctgtcactttgttcagtgcggtaaaaatttggtcatgacggtgaacctgataggcaacgggggctatatcaataagaacaattttttctatccgctctggtgctagtgcagtcattgccatcgcgatcttaccgcccattgaatgaccaataataatggcggactgaatttgcagatgatccagcagggaaataacatcttgtgccatatcgtggtaatccatgttatttgcccgtggagataaaccgtgattgcgtacatcgacttgaatgacgggatagtattgctgcaaatcacgagccaaaaccccaagattattgagatcaccgaataacccgtggattaataccacagggataggagagagcggattttcccgtatctgcatatggcagtttaatggggtgactaattccatgataagaattgttttctttcaggattgatatcatgccgcgtatattggtgcttaaaatataaaaagcaaccaggctgtaca

SEQ ID NO: 5370 - DNA, 679 bp, Photorhabdus luminescens
atatctcatgtaattcttggattttgggctctaaataatgccaactctgtcttgatgaaaataccatgttaaacctctataactcgttaattttgactcatgcgatccccaaacaatgtgataaccattccatgatcctgtccaaaagaacattgtaagcccttaaccttagaatgctgattgtaaattccaatggataaccgttatataaaaaggtcctcatccacggctgaatcagatagctatgatttggtcccacatgatcctaattcctgacaatacctattaaggcactccaatatcgagaaatacttttccatagcgaatacccagattatctgggccatacaatatctttacgacttctatcaaaccaaacccattaaatcacaacaatagaacaacaaacagtcttttttccccggatattctatttcctaaacactaaccattattcaaacctaatttttctctaaacgctatctattattcaaacctaaccattccctgctatatgctattattttcttccttacacgattagaagttcatttgaaataacattttccacatcggcttaatgcccaaatcagcaatatcagtcaggcaatgtctcttatgcttcagcttagtgttctcaattggggaacaatgcccaatgataaactgaccctacgta

SEQ ID NO: 5371 - DNA, 786 bp, Photorhabdus luminescens
caagcttcaacaatctcttgatctgtgaaagtgacaggcatgtcaacacacttcatggaatcgcgcaggcgcttgatatgctctcgtatccgatacatatacatttgcttatccgttttattccaatagactcacacaccttcaaaaacatttgcgccccaaaaagcgccctgcgttctggcatgtaaggtacacttttcccaaggcacgcattcaccatttagccatgcgaattctggcgtattatgggtagacgacataagttaatctccgtttatgatgcttcacgctgaaacgttaaggaatcagtaccactgactttttccaggattaaactaagagacggtgcgttatcaagcaggtaatgtcctgctaaatggccatcaggacggataacaaacaatgaatcttgtttttctgtcagggtttcaaaaaacagaatatcgtcgtaagtaacactgataagtctctcgtccacttttggcgagaaatatccttttggtacagcagcaaccaaactaaaatccaaaccattataggtgtggctttgcttatttaaatactgcttcaccttatttgggtctgcgcaaaaaagacaaacaaaccctttcccgaacaacttacgtaagcggcttttttctccggcgatataaaccactacatccggagagaacgcaccgacataaagtgtccgatgggtttaatccatcaaacttgaagattcgtgaggtaaaaggtgctgcattttcccgcgattaacttgcttaccaaagcgggttcagactt

SEQ ID NO: 5372 - DNA, 698 bp, Photorhabdus luminescens
cgtttgcgccgccatgagcggggccccaaagagaagcgatacctgcggcaatacaggcaaatgggttagcgccagaagaacctgcggtacgtactgttgaggtagatgcattttgttcatggtccgcatgtaggataaagatgcgatccatagcgcgttccagtactgggttcactttatactcttcacacggcgtagcgaacatcatgtttaggaagttgcctgcataggagagatcattgcgtggataaacgaatggctgaccgatagagtatttgtagcacatggcggccactgtcggcatttttgacagcaggcggtaggcggtaatgtcacggtgacgtggattgttcacgtccagagcatcatgatagaaagcagccagagcgccagtaacaccacacagtacggccataggatgcgaatcacggcggaaaccgttgaacaggcgatggatctgttcgtgaatcatggtgtggcgggtaatggtttttttgaatttatcaaactgttcttgtgttggtgtttcaccatacagcaggatatagcagacttccagataagtggattttgtcgctagctggtccatagggaaaccacggtgcagcaatacaccttcgttaccattaatgtaagtgatcttggattcgcaagatgctgtggaagtaaaaccaggatcgtaggtatagaaaccttgg

SEQ ID NO: 5373 - DNA, 761 bp, Photorhabdus luminescens
agtttcagaggaaaacacataaatatcgttattaatacggatgaccacaacgtgtttctcttcctcatctacgtatttattatacaaatttataatcttcatttaatcctctaatgtaccttcctttaaaacgcttagcacctaaagcaacatgcatgctctttattatttatcaaattttttcaagcaacataacaccccctttttattatgagatgaaaaatgcattaaataaaaaatagcacagattttttatctcatggatatttgagtgtaaaaaatatttttaatcaactttgaaatctgtcataaaatgccgattaagaatggtgtccacacctgtgccgaagacacagaaatcggtctgtttactggatgatggacaacgaaacgggtgcaaatgtgagatcgcaacagccctattcgcaatatcgccagcagatcaggcagaacatttaagatatccacagaattaatgttgctaacgataaattaccaattatcaggtaaatatctacgtgaaaagttttaacactgtcagatataccctctgctgaacaatgagatttttaaacctatgctatttcctactcaccctatcccatcttattttcagctctcgccagacgaatggatggatacacacctatagcaaatactttttcatgtctggaaaacagatatcccaaacgctaatatttttctctggtagtttttcccagcgaaaataattcgtgttatctaaaaattgctacctatat

SEQ ID NO: 5374 - DNA, 676 bp, Photorhabdus luminescens
  misc_feature (649)..(649): n is a, c, g, or t
ctctctttggggttagatattccttatttttgctggcatccagcgcttggaagcgttggcgcttgccgccagtgtgcggtgaagcaatatcaaaatgcggatgatacgcgcggtcgtctgatcatgtcctgtatgactccggcaacggatggcacttttatctctattgatgatgaagaggctaaacagttccgtgagagtgtggttgagtggttgatgactaaccatccgcacgattgcccggtatgtgaagaagggggcaactgtcacttacaggatatgaccgtgatgactggtcatacattccgtaaataccgtttcactaagcgtactcataacaatcaggaattggggccgtttatttctcatgaaatgaaccgctgtattgcctgttatcgttgtgtacgttactacaaagattatgccgacggcgctgattttggtgtttatggcgctcacgataacatttattttggtcgccctgaaagcggtacgttggaaagcgagttctccggtaacctggtagaaatctgtccaaccggggtatttactgataaaacccattctgaacgttataaccgtaaatgggatatgcacgttgcgccaagtatctgtcaacagtgtaacattggctggataccagcccggnggagcgttatggtgatcacgccgtata

SEQ ID NO: 5375 - DNA, 772 bp, Photorhabdus luminescens
  misc_feature (651)..(651): n is a, c, g, or t
aagctttgtataatgtgaaaaattcatggagaaatattgccatcgaccagccatcgaaggcgatatgatgtatcgtataaataataagataatcatcttctgccaattttattaaccggacgcgcagcatcaaatcggtattcaggttgaaaattagattttcttcttccttactaatttgttttacctgatcgtttttctcagtttcagacaacgcagataaatcatgatctgtaatcggtaaatcataatccgcggcaataaattgccgcggttcattattgatgattttaaaatgggtacgcaggacttcatggcgttcaagtaatgccttaacggctgcctcaaacgcctctatgttaatggattcccgcagcctgaaatcccccatacagttatattggcgactacctccatccagttgatcaataaaccatagtcgttgttgggcaaatgaaagcggataatgttctgctttaccatcacgctgaatatcttgcaaaaagtgatgcgtttgagtttgctcttctgcatcaagctggttcagaaaatcaatcaactcctgtttatgctgtttccattcactgagcaactcgggtggaatactgctgcggcgagtctcgtattgcaaacgattttccttaacacccnagtgttcccctgctttccgatccattgatatttattcgggctttctcatatttaactttcactgtcttgcccccgcccttccccaccttaaagtgtcttttctccccccagctgaaatcca

SEQ ID NO: 5376 - DNA, 700 bp, Photorhabdus luminescens
ctatgacacaacgagctggtcgggcaggacggttagaagccggtgtgtgttggcatctattcagccaagaacaggcagaaagagcggtagagcatagtgagcccgaaattctgaatgctgatctcagtagcttatggctctccttattgcagtgggggtgtcatgatatttctcaattgcactggctagatataccacctgcggcggctctggcggtggctaagtcgctgttattacagttaggtgcaatcagtaacagtggtcagttaacgtccagaggcagtaaaatggcggaatccggtagtgatccgcgtctggcagcgatgttatgtgcggggttggaacaaggggccgatatgctggcaaccgccgctatgctgaccgcgatttctggaggagccgccccgtgatggtcagccggacattacttattgggttgagcagcgacaagcttattggttacggggggcaaatcagttagttagaaatatgggggatcattttggtgagccaatcggaggatttgcttaatgcttttatcccaaaggttttcctgacagaatagcccaaaatcggcgatactgggtgggcgtatttaacccgtcgaacggtgcttggaatcataatttatgatgaagaaaccgctttctggtaatatgggctggtggttccttcttctatcaaaaagtagaaaccttga

SEQ ID NO: 5377 - DNA, 785 bp, Photorhabdus luminescens
  misc_feature (612)..(612): n is a, c, g, or t
aagcttgctgcacacaacaattttttcactataaactccttaaaccacgctatctgtaacctattggaaaacttagttaatgctctgaaacctacgatttcagagcttgctctatcaataataagataaaaacgcattatcaccaggttttgccaatattaaattggaattgctctgatctatcaccttcgtaatctttgatcggcttagcataagagaacaccagtggacctaaaggagacacccattgcaatgcaatacccgctgaaacgcggatattacctggtttaccgtaatcaggtataccactgcctttcatcgcagcagaatcattccaataagtatcccaaaccgtacctgaatcaataaagaatgaagttcggacagaattcgaatacttactatcgaggaatggcgtcggagtaatcaactcaaggctggctaccgccattgcgttcccccccacggcatcgcgagatgggctatctttcttagggtcatcttttccattcatataaatcgctttagggccgatattgttagaacggaaaccacgaaccgtactggagccacctgcataaaagttttcatagaatggtaactctttaccgnctaatccatcaccataacctaaacgggtgcgccccaagatcacccaagtacgatcgccattaatcggataatacgcagaggtatcaaaagttactttatagaattccgtatccgaaccaggactagtcactttaccattcagcgtcgatttcacaccggatgttgggagaagc

SEQ ID NO: 5378 - DNA, 686 bp, Photorhabdus luminescens
  misc_feature (559)..(559): n is a, c, g, or t
ctcgatatctttcctgacgacgagacgattgaactggcggaacaagagcgattggcagaggatttgcgtttactctatgtcgcattgacgcgttctgtttaccattgcagtgtcggcgtggctccgctgataaaaggcaataagaaaaaggccggggatactgatctgcatcaatgtgctctgggctacctgttgcaaaagggggtgaaaggggatgctgattttctggcaacatcgcttaaagaattaagcggagatggcattgttatatcatcaattaatgagactgatgatcacccttggcaatcgcaaagtaaaaatgatttagtcctgtcggccaggcaatttaaacgtagagttcaggatgattggcgtattaccagttattctggtttacgaaactctgtagttcatcgtggtaatgcttccgcttattttgctggagaagaatctattgacgtgattgttcagtctattgcgccaaaacttgatgttgatgctagtggtgaaagacagttagtagaacaacctgaaatgacaccacatacattcccacggngagcttccgcggggacttttttacacgctattttggaagaacttagtttcagccaattacctgatgagaaatggttggcagaacaactgcaatcagccggatttgatgaacgctggagtgggacatt

SEQ ID NO: 5379 - DNA, 784 bp, Photorhabdus luminescens
aagctttaagatggtgggtcgtgcaggattcgaacctgcgaccaattgattaaaagtcaactgctctaccgactgagctaacgacccatcttgtgacttctctcggcaacggcggcatatattactgatttttctgcactacgcaataattattttttcaaattacgtttaaatgcttactaagcactcaacaaaccccgaaaatgtattattacacccttccggggccaataattacagcgtagaaagctttttctctgccagtttagctgcgttcgaaccaggatattgtttcatgacctgttgataaaccgatctcgctttatctttctggcccttgtcttgcatgattaaaccaactttataaagcgattcaccactcttctgcgacttagggtactcttttactaccgtagcaaagtaatacgcagcttcgtcttttttacccttgttgtaattaagctgtcctaaccaataattagcattaggcatgtaactcgattttgggtaactcttcacgaaactctgaaaggctataatcgctttatcatattctttggtattcactgccaaatgaacagcagcgtcataatcacccttctcgctgcctgtactgacagatgatgatgcctgattgccactgttttttgtattacttgccgttgaagaagcctgatttgcagcaagtttactcccctcagaactaggtacaccttccagttgctgaaaatatccttctgcgctctaaatctgattgagctgtactgatctcctgaactgcctt

SEQ ID NO: 5380 - DNA, 700 bp, Photorhabdus luminescens
tgcaaaatggttggctgagcaaacaccaattataggtatcggggtggagactgttggaaccgacgcgggtcaagccggaaaatttgaacaaccttaccccgtacactggtactttcacggggcgggaaaatatggcctgactcagttgaagaacctagcaaagttaccgccaacaggtgcagttatcatgatagcgccgcttcccatcgttggtggttcaggaagcccttgcagggtgttggcacttgttgaataacacaaagttaatttgcgaagagtttttaaggaagagtcgatgaattcaaagtactgcttgttactaggaacagagaaaaacagatttcgtgcattggttgccacggctagagcaaccaacatgaaaatagcgatcatggccccaagtggttatgttaatggaaaccgttacgctgatctagtgattgacggtaacccagaaaacattgaacaagctctggctgcagtacagacctttgccgagcgagaaggaatgcaaccgggcgcagttgttccattgacagaaatgacgatagccccgggggctcgtatcgctcagtactataatttaaattatttgtctgaaaaagcgctgacattaacccgcaacaaatttgaaatgcgtaaggctgcacatgcaggtgggttgaacagttcgaagtttgcacgttttaatcaccttgag

SEQ ID NO: 5381 - DNA, 785 bp, Photorhabdus luminescens
  misc_feature (8)..(8): n is a, c, g, or t
  misc_feature (519)..(519): n is a, c, g, or t
aagctttntaacggtaaaaaactaaaagcctgatataccttatggatttcaagatgcatcgcggcggcaagggagtgaatccccgggagcatagcaaactatgtgaccggggtgagcgagtgcagccaacaaagaagcaacttgaaagatgacgggtatagattgatttactgtcatggtagtagataagtaggaaagttaagagctggctttatctacgaaatgagcaaggtgtaatcaaacgcatcatttctttaaaaaagcactggacagtatatcattaaatccgtactatccccacccgaaacggcgttaagcgcccgtagctcagctggatagagcgctgccctccggaggcagaggtctcaggttcgaatcctgtcgggcgcgccattatttgcgtgcaagagctgcggtgatgtattacgctgttggtaagttaagtatttagcagtaaatagctgttatggtggctatagctcagttggtagagccctggattgtgattccagttgtcgngggttcgagtcccattagccaccccatcttttttgtgacacgccagggtggcggaatggtagacgcgctaacttcaggtgttagtgtccttaccgacgtgggggttcaagtccccccttttccaccctacaaaagaaaaaagaattacagatcccagagtgtaaaaattccgcgagttacgcagcttggtagcggcactgggttgggaccaccgggtcccgacgttccgaatccctttatgccgacccaatttcatagaaacctta

SEQ ID NO: 5382 - DNA, 827 bp, Photorhabdus luminescens
  misc_feature (1)..(1): n is a, c, g, or t
  misc_feature (6)..(6): n is a, c, g, or t
  misc_feature (12)..(12): n is a, c, g, or t
  misc_feature (17)..(17): n is a, c, g, or t
  misc_feature (26)..(26): n is a, c, g, or t
  misc_feature (32)..(32): n is a, c, g, or t
  misc_feature (45)..(45): n is a, c, g, or t
ncgtcngcctanccttngatcacgtngaaagngatccgtgcattngagatcggataacaatttcacacatgaaacagctatgaccatgcttacgccaagctatttaggtgacactatagaatactcaagctttttaatacggctttataaggggaatcgatacttttgtagagttgccataagctagcaccaaagtactcttcagcagatagctcacccaatccaccgatttcaagccactcatttggcgtcagaacaccttgcgcataaagcgataaaacatattcatcataatggcgttcttcttctacaggcaccatttcccataacaaacgcttacccgccatacgtacagcggtacgataaaattcatcaagtaacagaatatgctgagtagagccgcaatcctcaccaccgaggctaccactcgcattgtggcgaaagcggttttcatcaataagaaaaaaattgacttcaataccaagcgctgccgcccactgctcaataagcgtacacttacgttgcagcaaaaggcgctcatcattatcaagccatgactgatgacatacccagatatccaaatcagaacaaccgctctgcccgattgatgaagtactgcccattgagtaaataccggtaataggaagttcaccattggcaggctgatctatgaagtgatctaatttattttctaaatcattaagataagatttttgcgcttcatcatgcccgaaaaaacaacgccatagggaacattacccgtaatgtaacctggcatcatccaatgaagatagtgcgataatactggcaggaaaccgatacctgat

SEQ ID NO: 5383 - DNA, 779 bp, Photorhabdus luminescens
aagcttgaatcttttacgtcgtaaaatcgagatatccaggatagggtttcttagccaaaaaccctatccctatggaccctctaatatctggctccatactagtaccactatttctaaaagctactgtcttctcttaaggagtaaataaatactcacagtaaggaacaataggcttggtaatagtgccgccaaaaccgctggcacgctgtacaccaagctcagtggaccaaagatctcattaagtacataaaataggaagccaaagctaatccctgttactatcctcactcccatcggcacactgcgcagtggtccgaagataaaagagagtgccatcaacatcatcactgcaactgaaagcggcgcaaatatttttttccacatattcagttgataacggcctgattcctgttcactctgcttaaggtatttgatgtactgatataagccactgatggaaagcgcttcaggctcaagtgcgactaccttcaactgttctggcgtcaggagaattttccaagccgcagaaatacgttgtgatccggtgatttttttgctgtctgcagatcagattcttccacctgagaaagcttccataggtccgtatccttatcataaaccggactggctggatattttacagagagtagtttttatcatcattaaaatgatagatattgacgcccttaatctcggtatcactcacaatccgctggatgtagataaaatccgccccatctatcgtgcacatacctttatttgttgaaaccagagaaccc

SEQ ID NO: 5384 - DNA, 728 bp, Photorhabdus luminescens
  misc_feature (1)..(1): n is a, c, g, or t
  misc_feature (15)..(15): n is a, c, g, or t
  misc_feature (26)..(27): n is a, c, g, or t
  misc_feature (33)..(33): n is a, c, g, or t
ntgcctaagctggantacgtgaagannaatccngtgcattaggctttgagttagtcggcttggagtttattcgtgcacgtgtttctacactgcggatttatattgatagtgagaatggtatcactgttgatgattgtgctgatgttagccaccaggtcagtgcggtattggatgtcgaagatcctatctcagtgctttataacctggaaatttcttcacctggcttagaacgcccattgttcacgactgaacattaccagcgttttattggtgaggaagtcagtctggttttacgtatagcaatgcaaaaccgtcggaaatggctgggcattattaaaactgtcgacggcgaaatgatcacggttacggtggatggaaaagatgaagtgttcgcactgagcaacatccagaaagcgaacctggtaccccacttttaaagttcggatgaggcaactaggatgaataaagaaattctggctgttgtggaagcggtttccaacgaaaaatcccttccacgcgaaaagatcttcgaggcgctggaaacagcattggccacagccaccaagaaaaaatatgaacaagatatcgatgttcgtgtcagcattgaccgtaaatctggtgattttgacactttccgctcgtggttagttgttgaagagtgactcagccgactcgcgaattactctagaagcggtagatttgaagacctgaatcatttgggtagtata

SEQ ID NO: 5385 - DNA, 776 bp, Photorhabdus luminescens
  misc_feature (543)..(543): n is a, c, g, or t
aagcttgcatcctgatatcaatctgtccgtcgagtacgggtgagtcagcagtactttgcatatacagctcaaactcctgcaccagaaactgacctatccgcctggaggtggctagcgcatccggtgacgccatttttaccaacgtatgggccacttcggaatcaaaacgacgaccaaataagttgtcaatatattgggtagttgacttttctctgtgagcatcagcctgtaatgacagtaccaaaccatgtaactcagggtatgcctgtaactgactggcagcatcatcaaataacttgatagtttccttcgaggtgacttgtccggtgagccagagtcccctggcccgtccaatcaaaaacctcgcttccgggatattcgcggtttccaatcggctcataaaagcaatcagactttcactttcggtcttaggcgcttcccgttcagcggttgaattcgttcgggtcaacggggtaatctgccattcaataagacgattaatttcgttttgtgttataccgccttttaaaccgacaacacgtncggttccatcaaagatgacgcgttgcgtaagatgttcagcatgttgaggtgccacggcgatcccaaggacgccagcggattcagctcgctgagcctgtaagtgctctatcattcggcccattttaaaacgtacttagttcacctgattggtgcgtagagcaaacttccttgggctatgctgttggcaaatcagtattgccccgtcaagcaacatatatgctcttcatcaaagg

SEQ ID NO: 5386 - DNA, 688 bp, Photorhabdus luminescens
tactgtccgcgggaagctggatgttcaaaataaccgctgtattcgtcaggtacagtggttttttgtttgatcaatttgtttgatcaaatagcactgagcgcaggcccttccttcagataggggataagtagttatcggagtgtgtaaacttgacgttaaacactccgaattttttgacattaagtggatgtcccgccgtaaccgaatagcggctggcgtagccagagggcggggagataccctcttgtatgatttaaagggatttttgatgggaaaagcatctaatagaagtgcagtgtacctctttacaggaagatattacgacgataatggcggtaatcgtattactgctgttggggctggtggtgaagtttatgcttatggcggaaatgatgatgttaccgttggttcatttaaagtcgatgtataccatacagatggcgaccttacggtaaagggagtgtcaggttataccggtattcataaaacgggaaatggcgggctgtcatttacgggggctgccggtgtagctgctattgatcacacgggtgaaacgggaaatttaaattattcgggtgcggccggttataataaactggtccgtaaagggttggctggtgatacttcgtttaaaggggcccgtggatccatcagttttggatgaaactaaccgggaaattagattttt

SEQ ID NO: 5387 - DNA, 798 bp, Photorhabdus luminescens
  misc_feature (600)..(600): n is a, c, g, or t
  misc_feature (691)..(691): n is a, c, g, or t
gaatggtattaccagaaaattggtaacagcaaatgcccgattgtcgatacctggtggcaaacagaaactggtggcttcatgatcacaccactaccaggcgcaaccgaactaaaagcaggttccgcaacgctacctttcttcggtgttcagcccgcattggttgataatcttggtgaacaactagaaggtgtttgtgaaggaaacctagttattaccgattcctggccaggacaagcacgctcactatttggcgatcatgaccgtttcgaacaaacctatttctctacctttaagggaatgtattttagtggtgatggcgcacgccgtgatgaagatggctactattggataactggtcgtgttgatgatgtgctgaatatttccggccaccgtctaggtactgctgaaattgaatcagctttggtctcccatcctaaaattgcagaagctgctgtcgtaggtaccccacataatattaaagggcaggcaatttatgcctatgtcaccttaaatcacggtgaagaaccctctccagaactctatacagaagtccgtaattgggtacgtaaagaaatcggcccgattgctacaccagatatnctacactggacagactccttaccaaaaacccgttcaggaaaaattatgcgtcgtatcctgcgcaaaaagcctccggcgataccacatctanggacatttcacactagcagatcagagtgtgaaaattgtagagaaacaacatgagattcggcaatatgcgcgtaggcgtgatcaaatataattatgagttctcgtatg

SEQ ID NO: 5388 - DNA, 707 bp, Photorhabdus luminescens
tgctctatcgtagcaagccaatgactttcaataaataaacatggctgatgctgattaaacaattggtgttggtgatggatttcttgattaaatttttctaatctttcctgccactcgttgttttcttcattttgctgatgttgatgatctggtaaatatagcgtggatgaacggcggctgatatcaaaaatctctggctgatgtgctgaattaacttcggctgctatattttgtggaaaaccaatgccgttcagacgtgctgataattctctgcctttgtttatccagatattcaacgcttttttttccaattcaataaaattaactttaatatcatggagatgaagaggtgtatgcaggaatagaatcaatttttcttcattgatatgatcgggtagagaatattgtattttacgtccaaacagacgggtttgtttttccagctttaacgcctgctgatcatttttatcctgacaggcttgagtccattggtgataaagcgaatcaatttgttgagataatattctttgcctatatgcttgttcggtcatcagagtattcaagtattggggtaataatttaaaagagtgaagatcatgccacaggcaatctttcagtatattaaatcaagaggtgatatctcttttctgcattgaagaagcacttgcttgaataatgaatggctttttccagcgcctgctgaacgt

SEQ ID NO: 5389 - DNA, 796 bp, Photorhabdus luminescens
  misc_feature (605)..(605): n is a, c, g, or t
  misc_feature (746)..(747): n is a, c, g, or t
  misc_feature (766)..(766): n is a, c, g, or t
tacatgctatttctaatctaacagcatctttcattattgttatttttatttaataaaatgtttttattgatattttatttaaataagtttttatgggtaatgatatttcattaatataaaattgaaactattattaatataataatttattattattgtatgatattcacaatccttagtcttttccttctactccgtcaccatttaatatctccagccttatcgcgattttctggcatttaatatatcagattcgccattagcaggattaaaaacccagacgctgatcacatttcgtactgatgatttagacaagcaaataattaaacattagaatagttttattatgccactatcaaattatcaatattttctatggaaagattatcgctttatcgccgcagcttggcagtacttatcctgcgggcaacatccgaatggacatatgtttcaacatcgggtgcattgggatctatttgtcacattatgcaccggattgaatttgcaggggcagaaagtttgtcccggtcagaccaagaacactcgatgcattcttatttatccgcgggtttaactttgcaggatatcaacgcacgggtacgaanaaccgctaatacctcattgggtaatttattagtcagcatgactgactttgtcacacttaaattaggaaaagggacagtacgatggataaacgccacaactcgatggctagggtcacaagttatcttttaatttacctgacnngcatccagccattgcaccncgctatggcctatcgcataacaccggatac

SEQ ID NO: 5390 - DNA, 699 bp, Photorhabdus luminescens
ttaacagcgacctctcggtaagttaacgtatcctcatccttacggacacaagataaatgtaatgccagttctgccagcgtattagttcggtaaatcgcgcgcataggcagctcataaccacgctgagccagctctgcgcgcaatgacataattaataaagagtgaccacccagagcaaaaaaattgtcgtggcggctaactttattcaaggctaatagcgactgccatagttgcgctaatacccgttcggcttcgccttcaggggcaacaaattcctgctgactataatcttgtttttgtggtagtggtaattgcttgaaatctaacttgccgttttgtgtcagtggtaatttctctaactgcacaacggcaacaggcaacatgtaatcagccagtttgctcttcatcgccagatgaatagcattaatattgatggttccttcagcaacaatataagcaattaattgtagtcgatcatcagagccaagttgtcggggatagacaactgcttcatgaatgccgggataatccattaattgattgctgatttcttctggctcaacacgaaaaccgtttatttttacttggttatcattacgcccaataaactctaaattaccattggataactgacgtacaatatctccagtgcgataaagcccgcccgggccaaaggattagccacatatacttcgcgta

SEQ ID NO: 5391 - DNA, 742 bp, Photorhabdus luminescens
  misc_feature (625)..(625): n is a, c, g, or t
  misc_feature (739)..(739): n is a, c, g, or t
taccgctatcagccatcacttgtaataccgtcaatgataaacgaccaccggtaatttctggatataacgaaccggaaagtgtcattgtgtcgttacccggccccagaaattgccaagcaggccgtatcccgatacggctgttaaaagcatgccgccatgactgctgatgttgcatactctggtatggtgtggtcttcaacataaaaacaaataaacccagtgcagccatcataattagaattctcctctatcagagaatgaactgcgtaaacgcgcctgctgtttacgttcccgatcatccaattcgcgcctaaccgctgctgcaatatcctgcgcagattgccccggtgcaccatagatatttatatgatagaccggtgattcactgcgatactctaccatctgccgtttgtctgctttcttttcctgaatctgaggataagcatgaaccggtaagctctgaacatgcaatggtgcggttctggctgcggcagaaggtgccattacgctcaaagaaaatgccgcagcggcagcaagtttggcagtctgtcgtccgctaataacattgacagggccagtgacaatctctggtccatattcacccacaatacccaaatcggccagncggaataatgccccctttgtcatgcttgggcagacccgacctacattaggactcacattattactggcgtcttttgaatatcttcctttgaccgatccatcagggagatactanaca

SEQ ID NO: 5392 - DNA, 681 bp, Photorhabdus luminescens
  misc_feature (139)..(139): n is a, c, g, or t
ccttattttcagtgggttaacacaatgataagtaatgtaaaaaattcgatacgcggaacatatcattcgattagcaaaaagtatttacctcgttatcttgccgaattctgtttcaagttcaattggcgctttaacctanaaaaacattcgaacagcttatttattcatgtatccgggcagcacctatacctgaatatttactcaggctacctgagattcgatggtaatcagggtaaaagaatgctcaccagatgggaatccaaaatacctaaaccgccttttggattccatatgggctttaaaatggttctaaaccttcctacccttggatgaaaccggcttaaactttaccctttaaagaaccgtacccgaaaaaaagcgattcaccagaaggggcccaaaaaatttggaggttaaaaccccctccccaaaaaactcccctaaaaaaccttttttcccgggaacaccccctgggggggcaaacccccaaaggggttttcaccagggggttttcgccccgggaacatttttttcccattttttcccaacaagccctgggtggaatttttaaccacacccgtttttttgttgttttcccccccaaaaatttatttatgcccacctcccccccccaaacaaacaaaaaaaatttttttggccacccaccaacattttttgtgt

SEQ ID NO: 5393 - DNA, 762 bp, Photorhabdus luminescens
aagcttctattacctatttcttaaacaggctgatacgcccaattaaccctattgttggcatagagtgatgacgagacatattccaaacacgtactcttaccttcagtaggtcagaccgtttaaaaccggcgatctaccaacattaatcaccggctggcttatgtgacaatttaatgtatgcctgatttccctacagaatataacttttggttatattaaatataaccaagaaatatattccaacagcgttattaaaaggaattaaatataaatatcataatttctcaatattctttataataatagtttagatattaattttataacaaataattcgcttgttaatacaagccttgcctatacccgtcatctttcaagttgcctctttgttggctgcactcactcaccccggtcacatcgttctctatgctcccggggattcgctcctttgctgtcgcgatgcatcttgaaatccataaggtatataatgtttacgcgatttttattattttatctaccgcgacggtcaccataccttcctgataactaaattcgaaattccaaccgagccgatttagcatattgaataatttatcaatcgtgtggttttccagcttcccattaatgatctcgctaattcttgcctgagtcgttcccaaagctccgccgcttttacctgacttaaaccgcgctcctgaatcatcttgccgatgatcaccattaattgagcgcgaatatgtttatcatttgcttcgtaggatt

SEQ ID NO: 5394 - DNA, 801 bp, Photorhabdus luminescens
  misc_feature (728)..(728): n is a, c, g, or t
aactgaggtcatctctatgcttggctggtatactgtgtggcaattgtgagcggataacaatttcacacaggaaacagctatgaccatgattacgccaagctatttaggtgacactatagaatactcaagcttttattacccgcaatcttggggtgggtctggtcaccagtttgatcgcactggtgttgggcggattgttatctttctggggcgatcgattcgggttatctactcaggctattaaaataattgtctggattatcagcatggtgggggtgatatggctgttgaatctttttcgtgattacaaacagcgtctgcctgtacaggaagtagcggttaaaccgcctgtagagcaagctgtactttcagaagcgccattttattttcaacggttgcaatatcagcttcgtcggcgttatggccccctttggcgtcggcgggtatgtattttgttggtgatgggacaacgggaacaagtagaagccattgcccccgggttaaccgcccagcactggcaagaaggcgagcaccacctgttgctgtggggcggcggtttgcaggtacagccggataaagcgcagttacaggcgttgcgccaattgcgtcgccgtcgtccgctggatggcgtggtgtgggtgatgaccgaagagcaactcggccagcgaacgcagatagagaccgcgttgcgcatgctggagaaacagggacaacagcttggctggcangccccggtgtatgtgtggaatgtgcgtcacagcaactgggaccagcgcgaacggccacccagaccgtgggctg

SEQ ID NO: 5395 - DNA, 770 bp, Photorhabdus luminescens
  misc_feature (764)..(764): n is a, c, g, or t
aagcttgggttaaatgccgcattttctgcataacgcccaggataaattattccatcttttcccagaagtgcggtaccactgtaggaattactgtatggggcatagctctggtttgctgcatctaatgccgttagtactaatttatccgtcgtttctagtttatagccatgattgaccggatccatcaacaaagttgtgatgcccagatcgtttgggccaaaagaatctggcagatagtgatctaatgttgaagatgcctgttttggcagatgaatctctaattgtgtgccactattaagttcattcataaattgacggcagtggccgcacggagagtaattcacagtaacagatgccagtcttttctcgcccaataaccaagcgtgagtaatcgcacattgttcagcatgaatcgtttgctgtagtggtacgccagcaaattccatattagcgccaaaatagaggtttccgctttcaccgcgggcaattgcaccaacattaaaatgtgagattggtgtcagggaactggccgctgcgagtggtaacagggcgacagccaaggtgttatcgtcaaaaccgcaggctttcttaatcgatttagcttgctcagcagtgagcatggcaggaaagtcatcgtttcctgcgtaaggtaaaagtgcatcctgtagtttagagggcaactgtacccatatggggtgaaaacgagcttgcatagcgtgatctccgaagtagcttaagatcattctaagttgtctgatgagatntgtaag

SEQ ID NO: 5396 - DNA, 680 bp, Photorhabdus luminescens
  misc_feature (667)..(667): n is a, c, g, or t
taatcatggataatcttccacgcgagcacatcacgaacgaattttggttgctagcagccacctttgcgttacgagctatcatcagtgctattcgggaacgaatcggttttatttgtggcaaaatcgtgcgtcagaaaattcgcgctatggtattggataagctggaacaacttggcccaatgtgggttaaaggcaaaccagccggtagctgggcaaccattattcttgagcagatagaagatatgcaggattattactctcgctatctgccacagatgtctcttgccgtcataatcccgattcttattctgatcaccctattccctgttaactgggctgccgggctaattttattcgctactgctcctctgatcccgctatttatggcactggttggtttaggtgccgcagacgctaatcggcgtaattttgtcgcactagggcggttaagcggtaattttcttgataggctacgtgggttagaaacgttgcgcctgttttatcgcggcaaagcagaaacacaacaaatcagcgaatccaccgaaaacttccgttacaggacgatggaagtgctgagattagcgttcctttcttctgcggtgctggagttctttgctggcatttctattgccgttgtcgctgtctatttcggtttctcctatttggnggagcttaatttg

SEQ ID NO: 5397 - DNA, 779 bp, Photorhabdus luminescens
aagcttgagttatgatagaaaaatgaaactttggaaagaaaaagataataatcttgaaagttatcatatagccgagcttcctccaattgtttggccaagatcttgtgcatttcttgatagtgataatttagtttttgcgtcatttggtgatagttatgttcaatataccatttccactcaagcatggcatcaagatcatgttagaccaacatacggttccaatgctgtatacgtttcaggcaaagacatttggagtgttggtgatgctggtatagttttctgtaataataggccatttgccgaaatgggaagtctgtgtaactttattatcgaatttgaaaatgtgcttattaccggtggacaaatgggaaaaatatttaatgctcgtactggtgatattatatatgaacatcattcccctctaaattgcgctgctgtttcatgggaagataatcaattttgtcttgttggtacatacactggagaaggtattgttttaagaaaaatagctggtgatattgttgttgataatatagtttcattacataaaaatgcaataaaaggagtttttatatctaaagaatttgttttttctgtatgtgccaatgcagcagttgcattacatagcattgaggacttttcatgttatgcatatattcctaaagctcatgaaaagattgctaatggatgtgatggcagtaaagaagggttgtttgtaagtgttagtcgagatttacccttcaatttggagaatgaaattatgaataataaaacaccag

SEQ ID NO: 5398 - DNA, 692 bp, Photorhabdus luminescens
  misc_feature (593)..(593): n is a, c, g, or t
atatttcactacgtgcctattttattaacggcggtggatattgttatctcgttaaaactaaagatttagtaaaccaagttccaaagttggatgatgtcacattgctggttgctgccggagaggatattactactgctgtaggtacactttgccaaccgggcaaaggcttatttgccatttttgatggcccagtcactcaaatagatttgaaccaaaaacccgatgaagtacttaagatttataccgctaccgcctatggcgcagtttattatccttggctgaccgctgagtggggagaaaaaaatgaagaagggaaaagagctagcgttgatattccacccagtgcagtgatggccggtatttatgccagtgtcgataacaatcgaggtgtctggcaagcgccagctaacgttgctattcaaggaggattacaacctaaatatccggtgactgatgatctgcaaggacaatataacaaagataaagcgttgaatatgatccgtacttttcctaaaagtagcccattggtttggggagccagaacacttgaggacagtgataattggcgtcatatccctgttcgccgtctgttnaacagcgcagaacgagatattaaaaatgccatgagccttgcggtctttgaacctaatagccaaccaacttgggaatcgtacgtcgagcgattgataata

SEQ ID NO: 5399 - DNA, 797 bp, Photorhabdus luminescens
  misc_feature (748)..(748): n is a, c, g, or t
aagcttggtcctttatagatggcagtggcacggtttacggtatgtttgtcattgagagtattgaccagacgaaaactgaatttatgtcgaatggttctgcccgcaaaattgatttcacattgacattacggcgagtggatagttctctaggtgaaatgttcggtgatcttcaggaacaattctctatgcttacagacaatttgtcagatagagtcagagaggtattgtcatgacatctgaatttggcagaggttccgaaaaaggcagtgcaccggcatttcttttggaaattgacaataaagatatcagcgggcgcattcaatcgcgcctgatgtcactcacaatgaccgataatcgtggctttgaagctgaccagcttgatattgaactggatgatgcagatggaagtttggtgctaccttccagaggtaatgtaatttcattggcgttaggatggcgtgatcagccactgattagtaaagggcgttttactgtggatgaaattggtcacagtggagcgccggataaattaacaattcgtgcccgtagtgctgatttccgtgaatctctcaatatgagacgtgaagagtcttatcataagaaaacgataggtgatattgtccatactatcgcggcgagaaataaccttaccgccgatttgcatcaggatattgcgaagatatttattaaccatattgatcagacgaatgagtcagatggtagttttcttacgcgcttggcaaggcangaaggagcaattgcttcagtaaaaaatggtaagttgatatttattcggc

SEQ ID NO: 5400 - DNA, 713 bp, Photorhabdus luminescens
tcaggtggcctgttctgagtggaacgatatccgtgacgagatcggtcataacgttggtgtttatgataacccggcggacttaaccgctaaatcatggaccgtgatgcgcttctcagaagttgaagagaacggcaaactggaatggctgattcgtaaagatggttgtatgcactgcgctgatccgggctgcttgaaagcttgtccagccgaaggggcgattatccagtatgcaaatgggattgttgattttcagtctgaacactgtatcggctgtggctactgtatcgcgggttgtccgttcaatgtgccacggatcaacaaagaagataaccgggtatataagtgcactctgtgtgttgaccgcgttaacgtcggtcaggaacctgcctgtgtgaaaacctgtccgaccggtgcaatccattttggcagtaaaaaagcgatgaaagatttggcggctgaacgggtgagtgagttgaaaggccgaggttatgagaacgcgggcctgtacgatcctgatggggttggtgggactcatgtgatgtatgtgctacaccatgctaacaaaccacagctatatcatggcttaccggacaatcccgctatcagcccgaccgtcaccttctggaaaggatctggaaaccgctggccgcagtgggatttgctggcacattcgctgccagcctcttccattatgtgggaattggaccaaccca

SEQ ID NO: 5401 - DNA, 699 bp, Photorhabdus luminescens
tgccaggattttaagttttgctctgattatcgccggtattatcggtctgaaattgtccagttaatattgaactgcactccaaaggtttcacattttggcagtgcagcttctatacctgtcatctttcaagttgcctctttgttggctgcactcactcaccccggtcacatcgttatctatgctcccggggattcgctcccttgccgtcgcgatgcaccttgaaatccatagggtaatataacccgaattctgcttaatccgtcattgaaaaatcgtcttctgagtagaaaactttcagtgatggcttcttcaatttaaggcagtaagcaatcaatccacctaaaacgcacaacagaaagccttttatacttcggtggcgggaatgctctatttgagaaagagtttttaattgcccattaatcgtttcaatgataaaacgcttttttaacattatcttatcccactcagcttgcatactcgctttcatgttacgccgttttttcgtgatgaaagtgacatcggttttagctaaatcgtccgccaattcctggctgaggtaacctttgtcacccgtaagagaacccgtaatttttttgataattcacgaacaggttcccgaacatccacattactccggagtcactcttaagcgcaaaaattttaccctgatgattgaccaccacgtgtaattcgaaccca

SEQ ID NO: 5402 - DNA, 793 bp, Photorhabdus luminescens
aagcttgcataaccaccaattcactacgggttgccagcgtaccaagccccagtaaggcaccaagcaaagctgccatcgggaagaatatctgaatatctttcggcacacttaacaaaacataaagaccagcagaaatagtagtatattccccctgccccacttttcttaactgctcgacaaacttaataataccggagagtgataccagcataaacagcgtcatcagaatagtctgtagaatagtccgcccgatataacgatccaatacaccaaacatcaggctactcctctgccgttgaaacgagcccggatcctacgcaccggcaacgtatcccaaatattgagaaccagcgccaacatcagataagtcccattagtcagccacatccaaatcatcgggtccaatttgcctttactaccgttagaacgcagggagctttgcaataagaagaaaatcagataaagcaacattgcgggcaacatgcttaatacccgcccttgacgtgggttcaccacacttaacggtacaaccatcatagccataatcagtaccgagagcaccaaagtcaaacgccaatggaactcagcacgggagtccttatcattatcctggcataactggataatagatttctgtccaacttattatcatctacgattgaagtctgatgccaataatcccttgatatcacggaactcaggatcctaaatcacgcagattgagggccttataacgcgtccatgataaggacgacacctgttgccgcagtcgctcacctatgacgccttaaga

SEQ ID NO: 5403 - DNA, 721 bp, Photorhabdus luminescens
  misc_feature (398)..(398): n is a, c, g, or t
tggtgcgtttccttgaagctgaggattttgatgctgcgattatttttgtgcgtaccaaaaatgcaacgttggaagtagcagaagcactggagcgtaatggctacaacagtgcggcgctaaacggtgatatgaaccaggcactgcgtgagcagacattggaacgtctgaaagatggccgtttggatattttgattgcaactgatgttgcagcgcgtggcttggatgttgagcgcatcagtctggttgttaactatgacattccaatggatgcggaatcttatgttcaccgtattggccgtactggccgtgcaggtcgtgcaggtcgtgcattgttgtttgtagaaaaccgtgaacgtcgcttgttacgtaacgttgaacgtacaatgaagctgactatnccggaagttgaactgccaaatgctgaattattgagtcagcgtcgtctggaaagatttgccgctaatgtacagcagcaattggaaagtagcgatctagatcagtaccgtactctgttgtctaaactgcaacctgcggaagatctggatatagaaacgctggcgtgtgatttattgaaaatgggacaaggtgagcgccccgtgaatttttccttcggacccggttgttcttccttgccgtgaatctcacatgacgtgatgatcggtctcattaaatggttttgatgaatctggcgaacgtagtgatccgtcttctagctgaaccc

SEQ ID NO: 5404 - DNA, 785 bp, Photorhabdus luminescens
agcttcatcttattttcaatcctatcaagatgaactcttttatcattcctcaaccaaaacacatagccagattcttatatgttggcagaattcttgcctataagtcaaaaaatctaactgaactgtttttagcgctttcacaattgcatggtcattgggagttacatatagtaggttctggtgatgatgaggtttatttaaaagaattatcttcacaacttaatataagtaacaatattatttggcacggttggaaaaatcagccttgggaatttgtgatggataatataaaagaggtgtccgcttttattttaacctcaaaatatgaaggctttggcatggtattagcggaagcaatatcttatggtatctattgtataagttcagattgtcaatgtggcccgggtgatattatcaatgattttaatggtgaactttataaatcaggtagtattcctgagttgtctgaaaaattacaactcattattgacgaatataaaataagagatcatcaagcaataaaaaattctattgcctttctttatgaagataatttcctgttaagaatcactaaggctttacctgtattagctcagatctaatgtacgacagttattagttcaaaaacgcgttgctatctatctctagtcaaatcggaggattggcagcagaatatggcatcgtttttccgcaacgctctgctgcctgaagcacttgaggatgtaaataatgattaactgctattgcatgcagggttttgaacaactctatgaatactgctgatt

SEQ ID NO: 5405 - DNA, 705 bp, Photorhabdus luminescens
atgatagcgcattcaaaacagatccaacctccgctttcggcggtattattgctttcaaccgcgaacttgatattaaaactgcacaagccattatcgaccgtcaattcgtcgaggtaattattgccccctcagtaaataaagatgtcttacctgtgctggcaaccaagcaaaatatccgcgttctggtatgtggtgaatgggaggaccgggctgctggccttgattttaaacgagttaatggtggcttactggtacaagatcgcgatcttggtatggttgcagtaactaacctacgtgtggtttccaaacgtcatcccaccgaacaagaaatgaaagatgctctgttctgctggaaggtcgctaagtttgtcaaatctaatgccattgtttatgcaaaaaatgatatgaccattggtattggtgctggccaaatgagccgtgtctattccgcaaaaattgcggggattaaagcagccgatgaaggcttggaagtccaaggatgcgcaatggcgtctgacgcctttttcccatttcgtgacggcattgatgccgctgcggctgtcggcgtaagttgcattatccaacccggcggttcaatccgtgacgacgaagtaattaccgcggctgatgaacacggtattgctatgattttaccggcatgcgccattttcccactaataatagcaggagtaatctgatgaatat

SEQ ID NO: 5406 - DNA, 765 bp, Photorhabdus luminescens
  misc_feature (583)..(583): n is a, c, g, or t
  misc_feature (646)..(646): n is a, c, g, or t
  misc_feature (684)..(684): n is a, c, g, or t
aagcttcccggctcatacggagtatctcttctggcaccatactattcaaatgtggtggacgtgctgctgataagaccaaatattcaacggttcggttagcttgttctaaaagtaatgccagttcatgacataacaaagcgcccatactatgaccaataagaagaagaggcccctgtgtatgcagcaatacatcttttgccgcggtagccaccaaatctcttatacataaagggagtggttcaatacttcgagaacctcgtcccggatactgaagcaccagcactcgataactatcagtcaacagttgctgaacccagtcggtcatagaataagcactgccgccgccaaaaggcgcaatcacaacagtcattgtcgtctgctgtcgatcgcagtaattccataatcctggcgtcagttgaacacgtttcattccaacgtctctgcggaaactttcaatttaggatcactcccatatgtagctatcccatccaggcattcttgttctgatcccgaaaaacccacattttgccaccctaacggtaatatccgcccttcaggccaatggagtgcttaccctctttgntacataccaccctgtaattcatgatgtttcccttcgccggttgatagtcaccacttgatccgnctgagcaagcaagtcaatatttgcgaggctacatccanatcccgaccacttttaagcagtgctgacctatggcttcggcggatcagtatccgagatgaatcgcatcatcgacgactaaa

SEQ ID NO: 5407 - DNA, 686 bp, Photorhabdus luminescens
cgaatgtcggtaataatgcacaaatcacttataatcagttctctggtccgcaccctgcgggattagctggaactcatattcactttattgaacccgtcagtgcgactaaaacggtatggcacctgggatatcaggatgtgattgcgatcggtaaattattcactaccggtacactttatactgatcgtgtcattgcattggccggtccacaggttgagaaaccccgtctcatacgtacttgcttaggggccgatctgcttgagttaactcagggtcagcttaaacagggtgaaaaccgtattatttcaggttccgtattgtgcggtactcagtcagatgaggttcatcactatcttggtcgtttccacactttggtttccgttttgcgtgaaggtcgcgaaaaagagctatttggttggatcatgccgggcatcgataaattttctatcacccgcaccaccattggtcatttcctgaaaaataagcgctttgctttttcaaccacaatgaatggtggtgaacgttctatgggaccaattggtaactatgagcgtgttatgcctttggatattatggcaacgcatttgctgcgggatctgctggcgggtgataccgatagtgctcacgcactgggttgtcttggagtagatgaggaagacttatcgctttgacctatgtctgtcctg

SEQ ID NO: 5408 - DNA, 785 bp, Photorhabdus luminescens
  misc_feature (756)..(756): n is a, c, g, or t
ttactggaagcgtattcttgggaatatcccaatggtaagttactggcaatggagatgaaacagcgcctacatgcaggtgaaatagtttcctttggccttgacgcatacagcatgatgcttgagcgtgttacccgttatctgattgaaattaatgatacgacccgtttagatctaatacgtcgatgtttttatttaaaagtttgtgaaaaactctctctaaatcaagatgataaaggctgcattggctggcgacgccaggttttgacccaactgatctatgagtggaagtgggatccagagcggttgaaaattttggataaccgcaacttatggaaaattgaacaggttcgtgatgcgcataatgaactgctcgataccatgatgcagagctatcgtaatcttatccgttttgcccgccgtaataatctgagtgtcagtgccagtccacaggatattggtgtgctgacgcgtaaactttatgctgcatttgaagcattgccagggaaagtaacgctggttaatccgcaaatttcgccagatctatcagagaaaaatttaacatttatttatgttcctcaagggcgtgcaaaccgtagcggttggtatctctacaatcaggcttcggctattggatcgatcattggtcatcaacctctggaatataatcggtatctcaataaactggtgtcgtggacctactttaacggctttggtacagaaaaatcgtgtatccatattcatcatggcgaaactcantgtgatgagctgaagctgcatgattcgat

SEQ ID NO: 5409 - DNA, 702 bp, Photorhabdus luminescens
tctggttgagaactatccaaccaatgaaccgacttccaacctctgagccaagttatctgacgctttgccaactggcgcgtcgcacaaataccgcgataaatcatttcatcgtaatcaatttcgccggaaagataagaccacatctgacgataaccgacgcaacgaatagaaggtaaatccacatgcaaatcatgacgagcataaagtgctttaacttcctcttcaaaccctgattcaagcatttgatgaaaacgcgcttcaatgcgttgatgaaggagctcacgttttgccggtgcaatagcaaattgatgaacacgataaggcagcgactctcctgacaatgtagtcagttcagtgagagttttacctgaaataagaaaaacttccagtgcccgagaaagtctctgtggatcattaggatgaattcttaacgccgccgcaggatcaatcttctgtagttgctgatgcaatgcatcccatccttgctctgccgcctgctgttctatttgtgcccgaataaccggattagcagaaggtaaaggcgacaaaccttcaagtaacgccttgaaatagagcatcgttcctcccaccagcagaggaatacggccagaagcagtaatttctgccatctccttcaaagcatcgtgacaaaaatcagcagcagataaggttgagaagggtcaagatattgataaacgatgg

SEQ ID NO: 5410 - DNA, 779 bp, Photorhabdus luminescens
  misc_feature (709)..(709): n is a, c, g, or t
ccaagccacacgtcatatcaagacatcaatcaacgtcctaactggcagaaaccagcgtcacggtattcgcatcattggcattacatgccgcttcaatttgcgccaaagtcgaatctgatttaatttccgtggctgactgttgccctttcccacctccaccacccacggtcattttcgaccaacccgccactcgcaatttcagcgaaagttgctggcaagcctcatcaggcacattttgatactcaatcttaaaagtctgagcggtggtatctcccggagaaatggttaccttgccattccaactattaaaaataatcccggacttaccatcctgagtcatattggtcggcaccactttgtaattaatagcaattttgttatccaaactgtcatagcctttggcaccatttttaattgacttcaaatttgcggccatctgagtaatattcgacgattcggttgagatttccgaagcccgaaacaacttaccaatccccgcggcggcggcggctaatatcacaataccaacaatcatcacaactaatgcttcaatcagcgtaaaacctaattgacgcttggcaccacgcaatacattgactttcttattcatgctgataactccaaaatcgaaaaatagatgtgttacaactcgttattaagaacttttgccgatgaatcactcacatacttacaaaagaaataaaacatntacgttatgatttcgttgataaaaatatttataaaactttaatgtttcattatgaaattaatactataag

SEQ ID NO: 5411 - DNA, 698 bp, Photorhabdus luminescens
  misc_feature (568)..(568): n is a, c, g, or t
ttcaattaattcagggagtaatgccgtagtttcactatttcccgaatcggcaatggacaggatataacaaggtccgccgccattttggaaataaagttttagcgcatcactgctggttgtagaggtaactgtatttatagcgtaagtgtaatctgtgtttgtatcgtcggcgtcaagagcaatatcggcagtggctgtatcgcctgcaactttcccggaaggagaagggggaggcggtggcgttggcgttggtttagtcgatgtgatggcgattgacgtaatacaaccgacattaaacagattggtaaaatccagccagctactcacacgtatcgcttttagagttgcgctggcttttttaggctggaagcggccaataaaaacaggtattgcggtgttcccgtggctgatagagagcgataatgatgcatcttcttcaatataaacgccgggataggtcggtgttgttggcatgatgcctccaattattgagcggtattctgggtgaactgcaagataataaattcggccggacgcactgccgccatgccgattttgacgatcattntgccttgcttgatatcgtcatcagtcatggtgacgtctttaccgatttgcacaaaataagcctgttcagctttgttacccatcaatccgccttgttgccagagggcatggagatagttatcaatcgccca

SEQ ID NO: 5412 - DNA, 799 bp, Photorhabdus luminescens
aagcttattggagtgaatgtttaaagcagccgccagacgtattgcaatgggatagtttttggcgcaaaggcgctaatgacaagtcatccgttctgtttagtattggtgaagagacaaccaaaaaaatcaagcggcttgcttcaaaaataggtggatcggtctttacagtcatgttggccgcatggagtgcttacatcgccagagagacaaaaactgctgatatcgttatgggggtgccggtgtcgatgcgtcactcggttcatcggcacattatcggctgtttgtttaatgtattacccatacgtttatccgtcgatcagacatttcaccactttctattagcagcgaaggagcgattgttatcggcccttgataatcgaaatttttgtctcagccaaatggtcgaacacctggctgcggaacgaaatgatggtcgtaacccattgtttcaggcaatggtgaatatgctagggcatgtagagcagtcgcgttgggtggcgctggagatggctggcgattctgttcaggtatcatgggcgggacggactatttccccattcagggtttgtcagcaggaaggccagattgatattgaactgctatttgtggatgccggttcccacttaagatgtgagtttaaagcggataaacattttttctcacattcaggtcttcagatatttgcagagcgctttgagctggtgggtgaagcgcttgtcacagcgcctgatgaacagttgactactcagtggttcacttgctgatccctatattcatcatagacgtatgtataaaacca

SEQ ID NO: 5413 - DNA, 705 bp, Photorhabdus luminescens
attaaattaacacctctttctcagagattgtgccacattcatttaatgtctcacctacttgttgcaactgatacatctgataataacgtccacgactcacaaataattgttgatggcatccctgttcaacaactgcaccacgatgcagcaccagaatagtatcagcctccacaatggtagacagacgatgagcaatcacgatcaatgttgtttgttgacgaatcaatctcaaagcctgttgtaccgcctgttccgtaccagaatcaatatttgcagtcgcttcatcaaggatcaaaatttgtggcgtttgcactaacactctcgccatagcaagcaattgtttttgaccggctgacaacgtattaccctgctctcccaagatagtatgaagtccatcaggcaatgtacgtactaactcagctaattgaaccgtttccagtacttgccaaaccttctcttctgaaatattccgaccaagcgtaatattgtcaaagaaagagtccgcaagaacaaccgggtcctgctgaactattgccacaccattgcgtaataccgaatgagacagagatgatacaggcctgccatcgagataatttcccctttctgccacgggtaatatcccatcagcaaatttgccagcgtacttttaccactaccagtatgaccaaccaaagcaacaaaaccatgagccggaacctgtaagtt

SEQ ID NO: 5414 - DNA, 756 bp, Photorhabdus luminescens
agcttcacaaattcgctcaaacccaccaccaaaactttcacgacgatgccccgtcaccagaatcatttttttattagtatcaataaacgggtaatgcttcgctagcttactccgcatagcctcatcattcattattcgatcgcgtacccacagcaacgcatcaattactgtatttccggtaacaaaaacccgattatctgcaatggattctttcaataaattattgtgggaattttccgtcggagcgaaatgatacattgccagatgccctgcaatcttacggtttgcctcttccggccaaggggaataaagatcacccgttcttaatccagcttcaatgtgaccaacagggatacgttgatagaacgctgccaaactggttgccattgttgttgtcgtatctccgtgaaccaatacaacatcaggtttaaattctgctaaaacaggtttcaatcctgccaaaatacgacaggtaatatccgttagatcttgccctgatttcataatattgagatcaaaatcgggagtgatctcaaaaaggtgtaacacctgatccaacatttcccgatgttgggcggtgacacatactttcgcttcgaaggcttcatcccttgccaacgcgtgtactaacggagccatcttgatagccttcggccgagtaccaacacagtcaacactttacaaggactctcttatagcagaacttgcagattttctgcaacaatactctaatgctattactcctgctgctgggtt

SEQ ID NO: 5415 - DNA, 683 bp, Photorhabdus luminescens
ctggttcagaaactgaaagagatggctctggaagatgtgctgattatcactaatgaagttgatgagaatttgttcttagcagctcgcaacctgtacaaggttgatgttcgtgatgtagctggtattgatccagttagcttgatcgccttcgataaagtggttatgactgctgatgctgtgaagcaagttgaggagatgctggcatgatccgtgaagaacgtctgctgaaagtactgcgcgcaccgcacgtatctgaaaaagcttctacagcgatggagaaaagcaacgccatcgttctcaaagttgcgaaagacgcgactaaagcagaaatcaaagctgctgtgcagaaactgtttgaagtcgaagttgaaggtgttaacactttgctggtaaaaggcaaaactaaacgccacggtcagcgtattggtcgtcgtagcgactggaaaaaagcttacgtcacactgaaggaaggccagaatatggacttcatcggtggtgcagagtaagtcggaggagtaaagaacaatggcaattgttaaatgtaaacctacgtctccgggccgtcgccacgttgttaaagtggttaaccctgagctgcataagggtaaaccttatgctccattgctggaaaaaagcagcaaaaccggtggtcggaaccacaatggccgattaccactcgtcaa

SEQ ID NO: 5416 - DNA, 782 bp, Photorhabdus luminescens
aagcttgttcacgacttaccacatgcacccgaatatcttcatgttcaccagataatccatgaataccggtcgctgtcgtggcatccacttcccccaccatcacagagatacgttccgttgttcctccgggactggagagataactcaacacgggtctgcaacgtttaacttcgattccggcctcttccattgtttcgcggcgcaccacctgttcgacatcttcgccctcttcaatcataccggcaacaatttccagtaaccatggcgtcgctttcgtctctattgccggaatacgtatctgctctatcaatacaacctcatcacgacgtggatcataaggtaacaatgcaccggcatggccccgctcaaaaacttcacggctaacctcttcactccaaccaccggcaaacagacgatgacggaaacggtaatttgtcagtttaaagaatccattgtacaaactttttttcgcgataatttctatatcctgcttatccaacatgactggcgttaacggcttcttatgcataaaattctcctaaatagttccttacttgctagccactaagatgatattaatccagcagagtttaaaaattcactcgttgatggtgtaaaagtaagctaaattaaggcaatatgggacaaacggctacctttcgctgatagcatactctgctagaatcagaaacatttcgcttttcaccaaagcgacgtaagagtctatcccataagcgcaattggtgccaggcggttttgtaaaggaccagtgactcaggctg

SEQ ID NO: 5417 - DNA, 700 bp, Photorhabdus luminescens
  misc_feature (638)..(638): n is a, c, g, or t
ataagaatacaacgtttttatcggattgttgaaggaggaatctttggcgttgtggcaacctactttaattcctccttggtgagtaattaatccaaaataatatgtgggtagaagcgagataaatcttgggttattagttcactgtcttcccgcaaaccaataccgcaaggctgatcatttaccagccagctaccaataagcgtataattgtcaccgaattttggcagtgtatgaaattgctgaacgatcataccttctttaccgtaagggccatcaacactggcaatttccttgcctttttcaataatacggatattagccccttcccgtgagaacagaggtttaataacatagctatccattgccggataattatcatcggcaaaataagcaggtagcaggtttggatgatttggaaacatcttccacaacatgggtagcaatgctttgttggagataatacttttccacgcgggctctaaccaacgaacgccagcatcttccaatttggtagcgaaaatctcacggaacatcaattcccaagggtagagtttgaatagattgctgatcacctggtcttttagatcagtaaactgccctttttctcccagaccgatattttcaataaataagaactncggtggaacaccggctttcagcgcacaatcttgcaagtattgaacggctccacgaacttctt

SEQ ID NO: 5418 - DNA, 788 bp, Photorhabdus luminescens
aagctttgacagaagagcaggaaccgacaaaacaggagctgtttcaggctttgccggtatctcaacaaacacaagttgctgacaactattcccgggagaaaagagaatacgaagcggttgtaacaaatctgaaagcagagatgaacgtcaatctctcttctcaacaatcacgaaaaagcgatatcaatgcgctcactaagctccgacaaaatatcagccagcgtttaaaagcacgtcaaaccttaagtcaaaaacaagtgatcagtaaagttgaatatcttgaacaggaaaaagagtttctggaaacagaacgcctgattgcccaacaaaatgcggagtttcatgttctgcaatcgcaatatattagcctggaagagcgcttaaacagcctgaaaacacaaaaagagcgcgaatggtttgataaaagaaaacaggccgaagttcaattggtcgttttagagcaagagctggcaaaagctcaggtacgggaacaacttgaagtcattcgctcccccgtcacaggaacagttcaacaactcagcgtccatacattaggcgcggtactgcaaccagcacaaaacttgatggtgatcgtccctgatgacaatgtgcagttggcggaagtgcaaattttaaacaaagacgccgggtttgtttattcggggcaacaagtcaccattaaggtcgatgctttcccttatacacgttatggcacgattgacggcgaactgttgagatatccagagattcaccaccgatgaacagctaggattggtctttctgctaag

SEQ ID NO: 5419 - DNA, 705 bp, Photorhabdus luminescens
caagtccgcgctggctcatcaggaggctccttattcgtggggttagtcgataactgtagcggatttcgcaaattgttgctgtgatttacgctatcggatgcagttgctgagaagtaattaaattgccagtttgttgcaaaatagtaccaagctgtagcttgaatatcttcggtgggggctgtttcaacaggtagccagactgtgccctccatagcaagtacggcatgtctcgccgaaagcaggaaaattaagggcgcattttaatggattatagttgtcagaggtagcttaagatgcgcacatcaggtaatcttcgcgccataaagcagttggagaaacgaatgaacgattcatacagtggtaaaaatggcaaagtcaaagtgatgtatgtccgcagtgagggcggtaatgacagccgtaataataacaaacgtccatctggtaagggacgtgatcagggtcagcgtcgtcgggacaatgagcgaacatcccgttctccgcgtgccaatgagcgtgaaagatcgccttggaaaacagtgtcacgccctgagagtgattctgtaacgccaatgcatggtggtatcagtgggaaaagccagattgatcctgaacagctccgtcgtcagcgaatggaagaaactcggatttatggcgaaaatgcttgtcaggcgatgtttaaaaaccgttctgaagcgatagttcgtg

SEQ ID NO: 5420 - DNA, 791 bp, Photorhabdus luminescens
  misc_feature (724)..(724): n is a, c, g, or t
aagcttgcgttttaatggcaaaaattttgttgttggtgatgctgctgattttgactggtcacaggtacagctcgctttttttgtggctggattagaggctacggcacaatatgttgaaaaagcgacagaagaaggttgtttggttatcgatagcagtgggttgtttgctatggagcctgatgtacctttagttgttccaggggtgaatcctcatgttttggcggattatcgtaaccgaaatattattgccttagcagatagtatgaccagtcaggtactgacagccattaaaccgctggtggatgcggctggaattgcacgtttgcatttgactaatctgttttctgtttctgttcacggcaaagcggccgttgatgaattagctggacagagcgcccgtttgcttaatggcattccaccggagccaggtcatttcagtaaacaactggcatttaatcttttgccgttgccaacagaagctgaaggttctgtgcgtgaagagcgtctccttgtggatcagatacgcaaaattttacaggatgagggattacccatttcagtgagttgcgttcagtcttccgttttttatggcaatgctcaagtagtccatttggaaacattgcgtccggttggggtggaagaagctcgagaagaattagagcggatggttgatattaacgttgcagatgaaggcgattattcaactccagtgacggaagcatcnggtaatgatgtgctgagtattggttgtttgcgccatgattattggaatgccgaaatattacaattct

SEQ ID NO: 5421 - DNA, 706 bp, Photorhabdus luminescens
  misc_feature (601)..(601): n is a, c, g, or t
taaaccgcatcacatcagagaaaatgggtatgacaccgtaagcgcccgccggaactctggccgccatatcttccagtaagctataagtatcaacgccaagacgctccgccaacagcttttcttccgcgcaaaatgcatccctaaaccaacgcatggttaagccagtaaagaaactaatcgactccgcctgaaccatgccgggaataacatgaggatttatccgtgtattcatatttgggtcagtgaccggttcaggcagattaacaacctgctgccaaaatgtgccaccaataacggcggtctgggcaggtttgaccacacctaaaccaagacagccgagctgtacatcaccaccgcccataatgaccggtgtgccaatattcagtccacattgaacagcggctttctccgtgacgtaacctaacaaggttcccgtctcttttaccggcgaaagaatatcagaacgcaatcctgccatttccagtagatcgggacgccaatcacggcttaccagatccagcatgcctgtcgtaccggcattggagggatcgactgccaactcaccactgagcatatttgccagccagtcgctgatcatggntaaggccgccgcctgatgatagatatccgggcgatgatgagctaaccataacagacgagggcttgcacccaacgctattgtgtggcctgacaccgatcacatcaa

SEQ ID NO: 5422 - DNA, 806 bp, Photorhabdus luminescens
  misc_feature (687)..(687): n is a, c, g, or t
aagcttttgtaatacaaccgcatggcccaaatgcaaatcaggtgcagtcggatcaaagcctaattttattgtcagttttctattttcttgtcttgcaagagcaagtttatcctgtaaccctaagggtggctccataattgcgatgtttgaaagcaacttatcaatattctctttcatataggtaacctaaataattacgtttattaacgatgaataaaacaactttataccatgtttataacaatctctattgtcaagtaaataattattcattctggtcttgttgcattaacgacgatgtagtatgcaaaaatatgtcgtttgttttttaattaggtcgtcttgtcctctttcgtgatgcaaacgaaaatgcggagcacatcgcatttcaatggaacgccaaacttccgcattcaacccccatccgtgcagcaacacaagatcacgcgaaccttcatcagaagtctgccaaaacagatcagccattgttattctcaactttatttgccatcaaggaagaagtctatgctaacaatggttgggtactgttggctatgccatcagcctctttggtttccacatcatggagtatgcagcttttgcaacaagcggctgaaacgtttggcaaacatgtgcccgtgctgtgctctaccctcagaactcccgtcactgccttgtgggcgctgnctcaaaaaaccgcctctatgggagaatatgatagcgattaccgactattgcccaccactgagtggcctgatccgtcgctataatatcacccgaccccacaacttgcgtcagttctggcg

SEQ ID NO: 5423 - DNA, 715 bp, Photorhabdus luminescens
  misc_feature (645)..(645): n is a, c, g, or t
cctttactgattttggtcagacagtttgccctatttggtcgatcaaatcgggcacatgttgaggccaataaggacaaagccccgtgaaaaaccttgtgtattgcctcaataaaggtttggcattttttaccgtcagcctttccgtttttttggtgttttgtgtcacatggcaggtggtttcccgctatgtgtttggtacgccaagtacggtaacggatgaactcgctcgttatctgtttatgtgggtcgccatgattggcgcggcatataccacaggtcaacatcgtcatttagctatcgacctgttaacgatgaaacttaagggaataggcaaaaatagtgtgggtttggtgatccaggccgcgatcatgctgtttgcttcgatcgtgctggtgtatggcggatcggtactggtgatctcaacccttgaaaccgggcagatcacgcccgcgctgggattaccgatgggatatgtctatttatgtctgccaattagcggtgttctgatgatctgctatgtgctagtagacattgttgctcttattcggaatttttcaggtaaagacgcggttatttctgaaaatcaataaagtcactaggcagaagaggatgggcttatggattggcaagtggttttagcgttgntcgggagttttgccgtgttgctggcactgggtgtaccggtatcctttgccgattggttttcatcattact

SEQ ID NO: 5424 - DNA, 762 bp, Photorhabdus luminescens
  misc_feature (592)..(592): n is a, c, g, or t
aagctttgaccatgctcaatcccggcggctctaagaccttgaatacgacgactctgagagagaacgcggcaggcaagcaggttaagctggatatcaagatcaaacgtctggaacagcaactgactatgcaggtggctgcctccacgttgttcggcccaaaatacgtgatgctgttttccgaattacaggcctacaaggaggtcaatgctcgctacaacgccttactaaaagcatcctctacggaagaggccgcagctctcggcgggctgaccacggtgcctccggcctccgatgatctgccggtaaatatttcgttgctgatgatggaggagcgtcctggctacatccgcatgaacgtcgcactagttaatgccagcaccgatggccgcttcaaagatttcttcctagagaacggcagattagttgtgtcggcggacaaggtattcaacttctccttcggtaccgcagcccgctccctagcctggcaacaacaataccggctcaagagtgagccaccatcctttcgctcgccgacctatgcgccaattcgctcggtgctggtcaaaaccgaattcgtcgagaagtacttcgncaactaccctagtttcggaaagcaccttgcgtgaaggcttcaaggccacgtgcttggtaaccgttcgcaaatgctgctgacatcgttgaccgtaagtgccaaccacgtcggattcaaatatcggtcgggttccattacacattaccgtaaggcccttggcagcccttgag

SEQ ID NO: 5425 - DNA, 686 bp, Photorhabdus luminescens
  misc_feature (615)..(615): n is a, c, g, or t
ccgttctgttattcctgtccggtgttatcagtgttgttatttacgctatcgtcaatagcccaagcatcggtctggttgaagaacctctgatgaacaccactcacgccattctgatcattatgttgagtgtcgcaactatcacaacgatgttctgttcagttgatactgacgccattctgaactccagtacctttaaagcgggtatgagcgcatgtatctgtattctaggtgttgcatggctaggagatacttttgttcaggcaaacatggattggattaaaggcaccgctggagacttaatccactctcaaccttggttgctagcgatcattttcttcttctgttccgccctgctctattctcaggcagccaccgcaaaagcgttgatgccgatggctttggctcttaacgtcacaccattgaccgccattgcctctttctcagcggtttctgggttgtttattctgcctacctatccaaccttggttgccgcagttcagatggatgacaccggcacgacccgtatcggccgttttggatttaatcatccattctttatccctggcaccattggggtttgctctaactgttgccttcgggttcctattcggcagnatgatcctctaattctggctgccattaccacttatccaggggcgtatcccgccctgactccctctccaaac

SEQ ID NO: 5426 - DNA, 787 bp, Photorhabdus luminescens
  misc_feature (6)..(6): n is a, c, g, or t
  misc_feature (37)..(37): n is a, c, g, or t
  misc_feature (616)..(616): n is a, c, g, or t
  misc_feature (668)..(668): n is a, c, g, or t
aagctngcactgtggttttcattctgatggggtgctngtttttaattggaaacctgttgtaacgaacggtttttattgcttaattgtggtgagtttaatagcttttacattttctgaaccgcatttaatgtccttgttttcattaaaatgatatttaggttttctcgtttctcctttttctatatttgattttttagatttaaaaccagtgggggtggcagatagctaacagtattaaagttaatgccaatttttttaattatttttaatgttgttaaatactcttgctttttcggggatgcttctcggttttctacaattatagtctctgatttttcgtaaacttgttgcagtcaggaaaaatcttttatttaagagaattggtttaatactgttaaagctgttaaagctgttaaagctgttaaagctgttaaagctgttaaagctgttaaagctgttaaagctgttaaagctgttaaagctgttaaagctgttaaagctgttaaagctgttaaagctgttaaagctgttaaagctgttaaagctgttaaagctgttaaagctgttaaagctgttaatgtggttaatactgttaaatgctttgctaggatatatncttgttatcgggttaacgctgttattttttttaccttatttaatcaattcanaacctgcgctttctaatgttatctcttctaatatcagtatggtatcggattttttacccactttaaaaaagccttattaatcactgcttttactttgatgataaagttttactgttttt

SEQ ID NO: 5427 - DNA, 699 bp, Photorhabdus luminescens
  misc_feature (661)..(661): n is a, c, g, or t
caacagaataacaacttatttggtatgcgttgcggtaacaactgtaagaaaacccaaggtaaaataaaaggttattccgcctatccgactatcaatgattcggtcaaagcctatatgagaaatatgaacacccataacgcttatgaatcattgcgtgcttcacgcgccaagcagagaagccttcaggaatcactcaataccagcaaattgattgataatcttgaaggatattcacaattgggttcgacttacaacaactacctgcacaaagtatttaacagcaataaagggcttattactcaggcgcagaagttagctaaaaacgatcacgactaagagcctgagtaagtcattagcatgaatatcttgtgtttgaatatttgtgctaagtaccaaaatcatccgttaccataaccaactatggaacggatgattttcttatgtccaccggtttattcttttcattgatagaatgtttaggttaaatactataatatcactcaatcttatattgagataaaatgatttaccagagtttaatatgaatttcttttcttttgagtttcttggttcctttgttgctttctttctcttgtattggatgctacaaaaacatgcgaaaacacataactacctgctgataatcgcaagttatctgttngtctttcctttatccgcttttaccagcatcctatttga

SEQ ID NO: 5428 - DNA, 828 bp, Photorhabdus luminescens
  misc_feature (557)..(557): n is a, c, g, or t
  misc_feature (588)..(588): n is a, c, g, or t
  misc_feature (651)..(690): n is a, c, g, or t
  misc_feature (692)..(698): n is a, c, g, or t
  misc_feature (700)..(729): n is a, c, g, or t
  misc_feature (731)..(761): n is a, c, g, or t
  misc_feature (763)..(775): n is a, c, g, or t
  misc_feature (777)..(808): n is a, c, g, or t
  misc_feature (810)..(827): n is a, c, g, or t
aagcttgttctgaacaccaaatagaatcacaaattgccaagacttcaattctgtgtctatgcaatttttctgtacttaaaacattggctggtttctgacaataagggcaaataatgagctgacttagtgaaatactcttctccctgcctatatagctaccggtctttctaatcaaaggtaaaacttcactagtaacccatttacgaaaacggtggggtaaagttcctttctttacggcatcacgacatcggattgtcagaaaatacattcctgattcattgataatgtttactttttgctctccaccaagagtgtcacttaaagctacatccttttcatcatcaccaagttttgcgatagcttcgcggctgtttgtgattttcaaagcatcacatacatcttgtgccacaaaccaaaaattgccatttttaatcaatgtacgtacttgctgattttcaaaaatgaatggagttacggataggctagccattgctgactccttacttttctttgagaattgggtttaccatttaagaatatggtgtcgggaggctcanaacggcagtaagaaaccgcggacttattccncttgcgggtggtcccataaaccatcatgacccggcctgcgaagacttgacatttattctattnnnnnnnnnnnnnnnnnnnnnnnnnnnnnnnnnnnnnnnncnnnnnnncnnnnnnnnnnnnnnnnnnnnnnnnnnnnnncnnnnnnnnnnnnnnnnnnnnnnnnnnnnnnncnnnnnnnnnnnnncnnnnnnnnnnnnnnnnnnnnnnnnnnnnnnnncnnnnnnnnnnnnnnnnnna

SEQ ID NO: 5429 - DNA, 691 bp, Photorhabdus luminescens
tcaaaaatcgaatactcagctctctttattgacagaagttttggcgggggcatgggagaggctggaaacgggtcgggcggatattgttattgcaccagatatgcattttcgcgcatcggcagaaattaattcacgtcagctttacagcattaccaatgtctatgttgctagccctgatcatcctatacatcaagagccggagcctttatctgatgtcacgagagtgaagtatcgtggtattgctgtggcagatacagcgagggaacgtccggtattaacggttcagttgttagataagcaacagcgtttaacagtaagttctctggaagataaacgccgtgctctcttggctgggttgggcgttgctaccatgccttatcctatggtggaacaagatattactgaggggcgtttgcgggtgattagctctgaatatagccatgagacaaatgtcattatggcatggcggcgagacagtatgggggaagctaaatcttggtgtttgcgggaaatccctaaattgtttgttagtcggtaagtagaagcgatgtgagcaatcaaattagaagacaggctgtaaaaaaacatgattcgatgattgcttagcgaaatatgaaattatggcacaacgaatctaacattcgtaaatggcgccagccagtacagcagactgtctggttggctgtgttaa

SEQ ID NO: 5430 - DNA, 773 bp, Photorhabdus luminescens
  misc_feature (671)..(671): n is a, c, g, or t
aagcttttaatatattaaccactgtaattatcgtatatataaccatctattatagctatatatctgaattttgctatttttgaatgtcaaatttattattccaactgcctacattacatcaatattaaaagataattgcatgatatattaggcactcatcaataaacccaacattatattactttatatccgtcatctttcaagttgcccctttgttggctgcactctctcaccccggtcacatagttatctatgctctcggggattcgctccctttccgtcgcgatgcatcttgaaatctattgggtatacccctaaatctaaaatgatttaaaattttcccttgtgaaaatatttttaatattaaattcaatttgaaactattaaaaaaaataactattcagatattctcaacaccttaaatactcggctaacagtaaaactcaatagaggatgaacaagagatcaaatcaattatacccgttatctttcaagttgcttctttgttggttgcactcgctcaccccggtcacatagttacctatgctcccggggattcactcctttgccgtcgcgatgcatcttgaaatccatagggtatagaccataaataataatcagtttctccattgatttaaccctaaaatatacgtcattaacgccttaatcgncattttaatttccttgaaggactactcctattctatagcactataaaggaatgtttaacttaaattctccatctctggttaaaaaccttatatttacacctg

SEQ ID NO: 5431 - DNA, 693 bp, Photorhabdus luminescens
  misc_feature (693)..(693): n is a, c, g, or t
atctgcacgctcaacaagagaaaggattactgcgtttcctgacgtgtggcagcgtggatgatggcaaaagtactctgattggacgcttgttacatgatacccgtcagatctacgaagatcagctttcaacattgcagaatgacagtaaacgtatcggtacccagggtgaaaaattagatctggctttattggtggatggtcttgctgcggagcgcgagcagggtatcaccattgatgtggcttatcgctatttttccacagaaaaacgtaaatttatcattgctgatacgccgggacatgagcagtacacccgtaatatggcaacgggggcatcgacctgtgatctctctattctgttgattgatgcgcgtaaaggtgttcaggagcagacccgtcgtcacagttttatcagtacattgttaggtattcgccatttggtggtcgcggtgaataaaatggatctgatggaatatcgtcaggaggtttttaatcagatcaaacaggattatatgaatttcgctggccaattgccgacaaatttggacgttcattttgtcccaatctcggcacttgatggcgataatatcgtcactataaagtcgaatatggattggtatgaaaggccaacgttgttggatatccttggaacaggtgatgtaaagaaggaagcctcgaagcagttactgcgtttcn

SEQ ID NO: 5432 - DNA, 775 bp, Photorhabdus luminescens
  misc_feature (687)..(687): n is a, c, g, or t
  misc_feature (729)..(729): n is a, c, g, or t
aagcttggtgcgataccataacgaaagaattgattcacaaacttaactaagactactgcatgattaatacagaaaccttcgacacccacacgcccatgatgcagcaatatctccgtcttaaagcacagcatcctgatatcctgctgttttacagaatgggggatttctatgagctattttatgacgatgccaaaaaggctgcaaaattgctggatatttccctgaccaaacgaggtcaatccgctggcaatcctatccctatggcaggcgtgccacatcatgcagtagaaaactatttagctaagctggttcaattaggtgaatcagtcgctatctgtgagcaaattggcgatcctgccaccagcaaaggcccggttgaacgtaaagtcgttcgcatcgttactcccggtaccgtgacagatgaagcgctattacaggaacggcaagataatctgctggcggctatttggcacgataatcaaggctttggttatgccacactggatgtgacatctggccgcttccaaatatctgaaatgatagagctggaaacgatagccgctgaattgcaacgtagccgtcctgttgaattactctatcctgaaagttttgagcatatggcgctaattgaaaattttcatggcctgcgccgtcgccctttatgggaatttgagctagataccgcanaacagcaattgaacctgcaatttggtacccgtgatctcgtcngttttggtgtggataaagcaactctcgctctgcgtgccgcgggttg

SEQ ID NO: 5433 - DNA, 693 bp, Photorhabdus luminescens
ccgcactggaatattgtggttatcaaccggtgttggttaacgggcgttcggataatataaaagtcacgtgccctgaggatttggcattggcagaattttatctgtctagaaaataaaggaacaggcatcatgaggatcggacacggtttcgatgtacataaatttggtggtgaagggccgattattatcggcggtgttcgtattccttatgaacaagggttgttggcgcattccgatggtgatgttgctctccatgcggcaacggacgctttgttaggtgctgcggcattgggcgatatcgggaaattattcccagacactgatccggcgtttaaaggggtggatagccgtaaattattgcgcgaagcctactcacgtatcagagaaaagggctatcggattggcaatctggatattacgattatcgctcaagcacctaaaatgttgccgcatatcccacaaatgagagtcaatctggcagaagatctgcaatgtcacattgatgatatcaatgttaaagccacaactaccgagaaattgggatttgttgggcgtaaagaaggtattgcttgcgaagcggttgctttgctggttaaggaataattgatggtattggctgaattaaattggctgtatgggcaaccagaagcgacggggatattaaaggcttcgccggaagattttattgtctgt

SEQ ID NO: 5434 - DNA, 781 bp, Photorhabdus luminescens
  misc_feature (754)..(754): n is a, c, g, or t
aagcttaacaggtaacgtggcaacaccggaaaaagttacagaaattgtgcaatctcttgaaagcctgtatcacttcaatttattgctgattttgccaccgatattggttttatggggagcaataacaaaacgtccggtgatacccgtcatgcttgctgcctgtgcattagctattgtacttggcataggtctccaagggctcacccttaaacagggccttaatgcgttgatagacggtttcaatctctcgatgttctctgaccagggacacaacattaccggagttgttagcgatgtctcccgtctgctcaatcgtggtggcatgttctcgatgatgagtactatcctgcttgcattttgtgcattcgcgttcgctggtgctttagcactcactggtgctttgaccatcatcattaaccggcttctacaagttgttcacacaaccgggcaacttatcgctgcaaccttggcaacaactattctggtaaccggcgcaacttgcaatggaaagctggctctcctcatcccggctgagctattcaaagatgcttatcgtcgcatggggctggataataaaaatctgtcacgaacaatagaagatggttgtaccgtcatagaaccgttgatcccttggactgccgctggcatttatatggcgacgacattgggtgtcagtacgcttgagctactgccttgggctatccagtgctattctgccatcttctttgctctcattatggctttacctgtttcngtatcgcaaaaatcacgcctgagaact

SEQ ID NO: 5435 - DNA, 698 bp, Photorhabdus luminescens
cttatcttttacaaaccatgattcatgacttttgtcccacatattttttaactgaggggtgatttgactcatatatgaccttcaataaggttgaatataaatatacccgttatccttcaagttgcctctttgttggctgcactcgctcaccccggtcacatcgttatctatgctcccggggattctctcccttgccgtcgcgatgcatcttgaaatccatagggtatagaaaaacatttcaacaatcggcaaaaaagcgattcatttttgccaccctgttgggttcaggtatagaaagtgcatttaatgacgctttcattcgaccaccaatcttcctcctttatggtggttacagcaatgtagggtaaatacctggcccaatgggcaatccagcaaaataccaacctataagcagcaatatccaaacggcaaaaaacaccagcggataaggtaataccaacgtgtaataagtacctagctgagcccccttatagtaccgttgaagaaaccccaaaaaaagcggtagaaaaggtgacatcggtgccaacggtaatactgcggaatcagaaataccgaaaatgatctgtgcaaaggcagggtgaaagccaagcaggacaaacattgggacaaaaataggggccagaatcgaccaaatgggcaaaccacttgcgatgaactacacaaaaaggcagataaaa

SEQ ID NO: 5436 - DNA, 771 bp, Photorhabdus luminescens
  misc_feature (769)..(769): n is a, c, g, or t
aagcttttggatgttcgacgataaatctcgccgttaaccgaggttttttgaccggcgttacgatgcaagatccggctgagttggacattcagatttttgctttcgccgctgtatttgtcgtctttagttggcctggctaccttttggttgtaatcgtaattactggcagtgatgcctgccatccagtatcccactggtagggagtaatggatggtgtagtttttgctgctgcgaccagaaggagagcgaatatcgcgcccaccggagatataaaatagatcactcaacgcaagaggattatccagatataaagttaatccgccttggtaacgcccggtacttttagaacccgaatcgtccagatagctagcgagtcgccaatgtcgtgactgacgccagttcagcacgatatcgctttcgcctaactgttcattcggtacaatttccatgtcggcttgaacagtaggaaaacgttgtaaattttctaatccttgctcaatatcccgtaagtcaagcagttctccttcgcggggaggaaatgtggttattcgttgaatataattgccactttcagcggtatagcgaatatgcccaattttgcccggtatgatcatgagttttaatgtcttggaattaagattctgactgggtgctaatactcggctagtgacatagccatgattaattaaccggttttgtatccgagtcattaatatattaatcccctgggtgcccagacattggttttctccctgttgggctaacgctnta

SEQ ID NO: 5437 - DNA, 684 bp, Photorhabdus luminescens
tgctcctgagtagtcgaattcacaagcctgaccaataacaattggacccgctcccaggatcaggatacttttaatatcagtacgttttgccattttattttctcctgattacttggtgttatgacgattatttttctgacaatactgctcaatgagttcaataaagtgatcaaataacgatgcagtctcatgtggaccggggctagcttctgggtgcccctggaaactgaatgcaggtttatcggtacgatgaatcccttgcaacgtgccgtcaaacagagatttatgagtaacgcgcaaatttgacggcagtgatttttcatccacagcaaagccgtggttttgtgcagtaatcatgacaacattacattcaagatctttcaccggatggttaccaccatgatggccgaatttcattttcatagtttcagcgccactggctaatgccaacaattggtgtccaaggcagataccaaagatcggaatctctgtctcaagcagggttttgactgcatcgattgcataaccacaaggtgccggatctcccggaccattggacaagaaaataccatccggattcagtttcagtacatcttccgccgatgtctgagcaggaacaactggtcaggcggagccacgatccaccagcattcgcaagaattacgttttgcaccaagtcataaa

SEQ ID NO: 5438 - DNA, 786 bp, Photorhabdus luminescens
  misc_feature (766)..(766): n is a, c, g, or t
aagcttggtggatgtctcctccggctaactcagttttatcgtgaatttcagcaacaccgaaatgttcgtttaacaaacgatttactgtctgccacatggttcacctctctatgtcgtcaattactttatgaacaattatagtcagagaaaacatatgatcaggtaaaaaagatgattaacagggttatatctcaaaacagatataaccctttttgttattgattgggctcgttagagatttgtagggctgcttgatacgttttacgtttggattttgctcttacaagttttatctgactgtaagccagtgccagtgtaaagaagatagcctgaacaataacaatgcatggccccgttgcaccatcaatgtggaaactgatcagagtacccaggacactggaactgactgatgcaatgatagcgacaattaacattcggtcaaaactgcggcataacatgaaagcgataatgcctggtgatatcaacattgcgataaccaaaatcattcccacggcttgcagggaagcgacgatggtcatggacagcaggcaaagcaaaccgtaatgcaaaagtttaacaggcaatcctactacgcgtgcttggttcggatcgaagcaataaagcatgaagtctttgcgctttagcagtatcaccgccatagtgatgcaggtaatccataatgtttgatgcaactcatctttagtgatccctagtatatttccgaacagaatatgagtcagatgttggtcggtatctatgcgggcanaaagaactaaaccaaaggca

SEQ ID NO: 5439 - DNA, 699 bp, Photorhabdus luminescens
  misc_feature (671)..(671): n is a, c, g, or t
cttcccccggtgccggtaacgcccgacggtccagcttgccgtttggtgtcaaggggaaggtatccaggcgtacaaacgctgccggtaccatataatccggcaaaatagcgcttagatgagtacgcagatggttaaccaactcttcattcgcttctgctgctacataagctaccaaccgtttgtcctggctgtcaccctgtgccaacacaacagcttcactcaccgccggatgttccatcagccggacttcgatttcccccggctcaatacggaaaccacggattttcacttgctggtcattacggcctaggaattccagattaccgtctggcaggtaacgggccaaatccccggtgcggtacaagcgggcatccggcttatcactaaacggatctagcagaaaacgttccgcggtcagttcagggcgattgagatagccacaggcaaccccatctccaccgatataaatctcaccagttaccccctgtggcactggctgaccataggtatctaacagataaacccgcgtattggctatcggtcgaccaatggggatccggctcacttccggtgataatgccgtaatgcggtaggtggtagtgaaggtggtaccctcactcggtccataaccattcaataattgttgaggcgggccatcacgcagaacctgngcaatgacatgtggatcaagatatcacc

SEQ ID NO: 5440 - DNA, 770 bp, Photorhabdus luminescens
  misc_feature (521)..(521): n is a, c, g, or t
aagcttgtactgtccgcgggaagctggatgttcaaaataaccgctgtattcgtcaggtacagtggttttttgtttgatcaatttgtttgatcaaatagcactgagcgcaggcccttccttcagataggggataagtagttatcggagtgtgtaaacttgacgttaaacactccgaattttttgacattaagtggatgtcccgccgtaaccgaatagcggctggcgtagccagagggcggggagataccctcttgtatgatttaaagggatttttgatgggaaaagcatctaatagaagtgcagtgtacctctttacaggaagatattacgacgataatggcggtaatcgtattactgctgttggggctggtggtgaagtttatgcttatggcggaaatgatgatgttaccgttggttcatttaaagtcgatgtataccatacagatggcgaccttacggtaaagggagtgtcaggttataccggtattcataaaacgggaaatggcgggctgtcatttacnggggctgccggtgtagctgctattgatcacacgggtgaaacgggaaatttaaattattcgggtgcggccgggtatataaactggtccctacaggggttgctccgtgtcactcctctaaaagagccggtgggaacaatcagccctggcacgaacctatctgggaaatttagactttgctggtgcccgggcagcatagacctaaccgtccccggttaacctggttcataatcaccgggtatgtgcttttct

SEQ ID NO: 5441 - DNA, 695 bp, Photorhabdus luminescens
  misc_feature (100)..(100): n is a, c, g, or t
cctttttcgccccaatgttcgcacattgggattgataaatagcttgtttccctctttcaataaattaaattttgcattttcaaatatagcggaatttttntgctctaccttgacatcattccccaacgatttcagattaatgcctgaaatccgcggcactcttctgacacgctcacctgaactgttcgacgttggtatcaccctatcgtcagattgtcctttggcaaactttgaagtcgttaaaacgccggtattttccacgcgaatactggcatttatctgtagacgatcaaccgcttgtttagcatcatccaacgcttgtagctcttcttcggtcaatcctttgtagaattttttttcagcttccggtattaattcgggatcaatatagctaccggtttcccccgcgcctgtcgattcatagccattaccagacaaaccactaccaccggcaccggtacgatcaggttttgaatcgctctgttttgcccctctaacatcttcttgtacctgggcaattttattttcagccgcagcaatatcacgtttaccccgatatttcgccccctgataggcgatattttgcttattttcccccctctccggccgtgggtgatggaaaaaagcctcctcctttcttaataatgcgtttaccggagcacgcgaagatctttgatttggactggcatgaagaa

SEQ ID NO: 5442 - DNA, 781 bp, Photorhabdus luminescens
  misc_feature (684)..(684): n is a, c, g, or t
  misc_feature (775)..(775): n is a, c, g, or t
aagcttcatttttacgcataccgtaaacagaccagtagctctggctgatgtcaggacgagtcgttacactcgcttggatacgcacttcttgcggatcgttcataaaacgacgagtaatgcgacggatagcttctggcatagttgcagagaacagtgcagtctgatgttcagcaggaatctggctcatgatgttttcaacatcttcgataaagcccatacgcagcatttcgtctgcttcatccaaaactaaaccgctcaggttagacagatccaacgtaccacgcttcagatggtccagaagacgccctggtgtacccacaacaatttgtggcccttgacgtaaagcgcgtaactgaacgtcataacgttgcccaccatacagtgcaacaacattcacgttacgcatatgtttagaaaaatctgcgcacgcttcggctacctgtaccgccagttcacgggtcggtgccaacacaaggatctgcggagctttcaactcagcattgatattatgtagtaaaggcagactgaatgccgctgttttaccactccccgtctgtgccatacccagtacgtcacggccatttaataaatggggaatacattgttgctgaattggagatggctcttcatagccaagatcttccagcgcagaaaggataggtgctgataaacccagatcagcanaagagatttcagtctcagtggtcatgtaatggtgcctcattagttatggcggccagtctacataacgcatcgaaaaaaacttcggtcattntgattt

SEQ ID NO: 5443 - DNA, 691 bp, Photorhabdus luminescens
  misc_feature (494)..(494): n is a, c, g, or t
atcgaataggcttacagtattcgtcagtgctgtatatgtataacagtaaaaataagaagattatgagtgaaattatctacggtattcatgccgttaaagctttactggagcgtgatcctcagcgttttatcgaagtttatgtcctgaaaggacgtgaagatcgccgcctgacaccattgattcatgcgctggaaagcatcgggatgactatccaactggcaaatcgtcagtggctggataatcaaacggaaggtgcggtgcatcagggaattattgccaaagtgaagccagggcgtcagtaccaagaaaatgacctaccagatttactggcacaagtagaaaccccgttcttgttggtgcttgatggcgtgacagatccccataatctgggcgcttgcttgcgtagtgctgatgcagcaggtgtacatgctgttattattccacgtgatcgttctgctcagcttaatgccacggcgaagaaagtggcatgtggngctgcggaaagcgtaccacttattcgtgtcaccaaccttgcgcgtaccttacgtttattgcaagagtacaatatttgggtggtgggtacagaatgagaggctgaccatacgctggatcagagcaaactgactgggcctatggcactggtgatgggagcggcaggggaaagtctccttcatctgactccagaacactt

SEQ ID NO: 5444 - DNA, 790 bp, Photorhabdus luminescens
aagcttatattggcgttttagttgacgatttatgtactttagggactaaagagccgtaccgtatgtttacttcacgagccgagtatcgcttaatgttacgtgaagataatgcagacctgcgtttaacagaaaaaggccgtgagttaggtctggtagatgattcacgttgggaacattattgccgtaaattggaaatggttgaacaagaacgccagcgtttacgtaatatttggattcaccctaattcaaataatcttaatgatataaacaatatattgaaaatgccattgtcgaaagaagctaatggtgaagatctactacgtcgtcctgaaatgaactataaacttttgacctcattgcccctgttttctccaagtcttgaagaaccacaagccgctgatcaagttgaaattcaggtcaaatacgagggatatattgcccgtcagcaggaagaaatcgaaaagcagctacgtaatgaaaacacatcattaccagtcgatctcgactaccgccaaatcagcggtctttccaatgaagttgtcgctaaactcaatgatcataaaccgagttcaattggtcaggcttcacgtatttcaggggtaacacctgcggcaatttcaattttacttgtgtggttgaaaaacaaggattattgcgccgcagctcctgagaggatcttgattatgctaacaaactagaattgtgctgacaaagcaggatagaactgcactacagcaaacagcaccttgtagcatgttgattgctcatagcggataggctacaactacat

SEQ ID NO: 5445 - DNA, 796 bp, Photorhabdus luminescens
  misc_feature (721)..(721): n is a, c, g, or t
aagcttgtggcagtggtgcttgtgcagcggtagcagtaggtattcagcagcaattgctcgacaaccatgttcgggtagatttgccgggaggttcactgtttatctgttgggatgggccgggaaaaccgctctatatgacgggaccggcgatgcacgtttatgatggcacaattcatctgtaatcgattctgttttgagctgcggggcatcggagatggagaaaaaagaagagcagttaagcatcaatgacatacttgatgatcagactgttgtggattatttattggaaaaccccaatttctttatccgtaatgcatgtgtcgttgaacagatgcgggttcctcacccggtgagagaaacgatttctttggttgaatggtatatgagccgccagagaacgcgtattgcttatctggaagaagatataactctgctcatggaacaggcgagagtgaacgaacaactgtttgagcagttgcttaaattacttgttaatttggttgcggcagagagtttgcaagatatgcttagtcggttaagtttatgggctaagaatatgggactaaatagtgccagtatccgtcttttcagtgataaatggcatattggtgcaccacttgatgcgcctgatttagcgctttctcgcaatgcttttgaaccaatccgtattcagcgttttggtaataaaaaccactatctcggtatgctaaatggcccgganattctattgttgttgccgcaagttcggcaggtccgttccggtgccgtctctctattgcgaacgaggggccaactg

SEQ ID NO: 5446 - DNA, 706 bp, Photorhabdus luminescens
  misc_feature (638)..(638): n is a, c, g, or t
tctggttgagaactatccaaccaatgaaccgacttccaacctctgagccaagttatctgacgctttgccaactggcgcgtcgcacaaataccgcgataaatcatttcatcgtaatcaatttcgccggaaagataagaccacatctgacgataaccgacgcaacgaatagaaggtaaatccacatgcaaatcatgacgagcataaagtgctttaacttcctcttcaaaccctgattcaagcatttgatgaaaacgcgcttcaatgcgttgatgaaggagctcacgttttgccggtgcaatagcaaattgatgaacacgataaggcagcgactctcctgacaatgtagtcagttcagtgagagttttacctgaaataagaaaaacttccagtgcccgagaaagtctctgtggatcattaggatgaattcttaacgccgccgcaggatcaatcttctgtagttgctgatgcaatgcatcccatccttgctctgccgcctgctgttctatttgtgcccgaataaccggattagcagaaggtaaaggcgacaaaccttcaagtaacgccttgaaatagagcatcgttcctcccaccagcagaggaatacggccagaagcagtaatttctgccatcttcttcanagcatcgcgacacatatcagcagcagaataaggttgagaagggtccaagatttcgttaaacgatgagg

SEQ ID NO: 5447 - DNA, 789 bp, Photorhabdus luminescens
aagctttgatggatgaagaaatcgaaacttatgagcaggagagcgagattccggcaaccagcttgatgatggttggagattctcttcctgcttttggtattgtcgctgctgttatgggggttgttaatgctttggggtcggcagatcgcccggcaggagaacttggcgtgctgattgctcatgcaatggttgggacattcctcggtattttgctggcatatggttttatctcgccattggcaacattgctacgtcagcgcagcggtgaacatcttaaaatgatgcaatgcattaaagtgacattattgtccagcctgaatggttatgctccacaaattgcggttgaattcggtcgtaaaacactctacctcacagatcgcccttctttcactgaattggaagaacatgttcgccgggtaaaagcacctgttcagcaagaaactgaagaacaggtatgaaaacgcgtaacgtctcagtcattagggtaaaaagacgtaaaaggaatggcatcaaacatcatggtggttcatggaaaattgcttatgctgattttatgactgccatgatggcattttttctggttatgtggctgttggcaatttccagcccacaagaattgacccgaattgcagaatatttccgcaccccgttacaagttgcaattaataaaggggagccgagcagtgatagctcgaatcctattccacgaggaggggaagatgtgcttcatcacgaaggcgatattctgcgtcagggtgaaagcgctgaagctaatgatgaggctcgcag

SEQ ID NO: 5448 - DNA, 702 bp, Photorhabdus luminescens
gggtattacaccgcaagcaatgattggtcatagcctcggtgaactggttgcggcctgtgtagggggtatgcttgaactggaagatacactggcattggtagcaaatcgagcggcaatcatgcagcgccagcccacaggagcaatgctggcggtacaggcatcatctgaacgtatggttgcgctggcaccggagtgtgaatttgcagcactcaacgggcccgcacagtgcgtgataactggcagccatgacaatattgcggtactggaagaacaatgcaacaaggcaggtatttcttgccagcgactaacgacatcacatgcatttcatagttcattgatggatgctgccgcacaacagatgcgggaattcagcgcaggcttcacgctacaatccagtaccattccgatgatatccaatatcagtggccgttggttcagtgaacaagatcgcgataattctggttattggggagatcatctgcgtcggccagtacgcttctatgacggtattcttacgttactgaaccattatgacaatccgatcctgcttgaagtcggtccagggcgtgcactgaccagtatgctgaaagatctacagcaaacaggccaagcccagatactaaccacgatgcgccatactcgccagcaaaaaccggatgaagaggtgctgctcaataccgttgggcagttatggcagcaagg

SEQ ID NO: 5449 - DNA, 769 bp, Photorhabdus luminescens
aagctttgagcaaagattccggaataaacgtcagattgcctcttgcccttgagcaggccacatatagtttattgcgtgtctccgcattgatatcccgaaaacttccctttttccaagctcttacattagcgggattaaggactacacatacatcatgatagtggtctactcccttcgatgctccccaattttgggagtggcaggaatacttgtggtgttccctgtaaaacagcttcaccgtttccggatcccggtagagagcaagtacagcttccgggttatcctcgtatctaatgacactttcccggcgatcataagcttcgatttcgataccaatcttttccgtaataaaatcgcaaacacttttgctacatctgcggctctttttgagactgtcggtatcgacgagcaatttagcctttttaaatttagcctcgtagaccgtgtaatctttgtgaagactagcgttcacattaccatctcggcttgtgtcgaatgtgtgttggaaaaaatcgccaacaaaggagacatttaactcagcggcacttatggctagcagaaggtaaaatcatgcccagcaaagtcctgaacctcatccacgaagaaagcatcaaaatacttctccatacgcgctatgatcgcaccaaccagatgagattgctcgatgaatttggcaagaccggtggccgaaaccctgcgattggttgacacctaaacgcggtcggcaatcaatgcataccgtgggtattgccaagggaagtttgaaagg

SEQ ID NO: 5450 - DNA, 686 bp, Photorhabdus luminescens
tatcaccgcattgaatttagcaattaaaatgatacaaaacagtaatgaataatagagtccaccaagggcactttgcccgtaaacgtttcggtcagaacttcttaaccgatcaatttgtcattgatagtattgctgccgctatcaatccacaacccggccaagcagtgttggaaattggccccggtcttggtgcattgacagaaccggtcggcgaacgtatggataaaatgaccgtggttgaactcgaccgcgatttagccgcacgtctacaagttcatccacaattaaaagataaacttaccatcatccagcaagacgccatgacggttaattttggcgaattgtctcagcaaagagggaagccgctacgcgtctttggtaatttaccttataatatttccacgccgttaatgttccaccttttcagctatactgatgctattgctgatatgcattttatgttacaaaaagaggtggtgaaccgtctggtagctggccccggaagtaaaactttcgggcgtttaagtgtcatggcccaatattattgtcaggttatccctgtgctggaagtacccccaaccccggttactcctgcacctaagtcgattcagccgttgtacgtctggtaccgcacaaaagcataccgcattccgttaagatattcgtatgctgagccggatcacaaa

SEQ ID NO: 5451 - DNA, 763 bp, Photorhabdus luminescens
  misc_feature (663)..(663): n is a, c, g, or t
aagcttgtaattcataaagattagtacagctttgcccagtgtcccgcccattctctcgaaaagttcactcactgtcattcattacactatgtggtaaattggttataaatcgcaagttaggacgatcgtaatagaaattccctgtttccaagtcatcagcaatcaatcagttatgatacctatcgtgcaatatttgtttttgtagttcaggtggcatagaagggtgattaaggtcgataagtccgaggggggacatttccactaaaaagaagtttaagtttagaatccgcaattctttattgattggatatgattatagtttccatgaaacactttccagaaatactgtaatatgaattatcgcatctggtttttattgaatttaagcctctcagtttttatactatcgttttttctgtcttacttctccgttaatgtgacaaaaatattttttcttggctatcaaaaaacacttgaaaataactatgcaaatgataagttttaatttcaaacattctaggcaaggaaaataaaaatgacaaataaaccgattgtctatgatttccatggtgataaaccattaagtaaacctgttctgatataagcccagacttatattatctgtaaaaacgactgtataaaataacgggtgaagatggtgtnttcggactagatacctctgaatcgtaataatgtatattgataaactcgttgaacaacgtttcgcgctaactatcttgtagtgcgaaaactatctacatgg

SEQ ID NO: 5452 - DNA, 691 bp, Photorhabdus luminescens
taataggagtggaaatgcgaactcagaaacgatgtatgggatatgtagccatagtagttgatgactatgaccgcgcaattgagtattacattgaaaaactgggttttacccttgttgaggatattccacagccggggaaacgatgggtagtcgtttccccgacccagaaagcgattgcaatcttcttctggcgcgagcctccaacgagaggcaagaagatttcatcggcaaccaatgcggcggtagggtatttctttttctccagactgatgatttctggcgcgactacaatgccatgaaatcaaaaggcgtagagttttctgaggaacctcgtgatgaggtatacggtacagttgtcgtatttgaggacctttacggcaatcgctgggatctttatcagaacaagtaaggctaaaaactatcttccggctactttgtcagtatgtagccggtaactgctgttacgtctgctctagtcgctcagagcagacggtcagattcgattacattctgcgtgcggaagctgtcagtacgagtccgagttaattcagattagaggcgcagttttctatccttcattccgcacctaattcaggaataaaccgctttatattgtgcacctaataaactcaaaagctcatggtggtaagattgcattcctgtcaccattttatgttcttgaaattcaaag

SEQ ID NO: 5453 - DNA, 759 bp, Photorhabdus luminescens
  misc_feature (37)..(37): n is a, c, g, or t
  misc_feature (586)..(586): n is a, c, g, or t
aagctttacctgcccctgaactctgtacacgttcttncattaagtaacgggcagataaagcaaaacacaatccttgcatgaactttttagactcagcggtatcccctttagtcaggagcacactgccaatttccgggatgattttgctgattttttccaacacattaccatcctggctaaaatggaatgaataagcctccagcgctttcccattcgcgataaggtcgaagatcttattatcaattttttgtagcacatcccctttgattgccccacgatgttgagaagatgttgtcagcagatttttatccaacagtgctagcttattgaccggcaactgattaatcctgttttttgcctctttcagtacggccagatcttcttccatcaatcctgcactgaatcgtccatctgcctgtacaacaaactcggggttaacataactgctagtttcaactatagccgtggactggtaagcctctccagacaaaccactgccaagggcacccactcgctgcggtttagcattgtctctctgtttcgcttcctttgcattagtctgtgcctgaaccactttatcctcagncccggcaatatcctgtttgccctcattctccgccttttggtaggcaacgttagccttatttttggctttttcctgtcgctgttgttggactgtcccgctttacaattattctttataagcctctatgactcttgttgccaccataccatgctgctcacttttccttcaccaga

SEQ ID NO: 5454 - DNA, 673 bp, Photorhabdus luminescens
tgcggatgttacaaaaacaggcccaccagttgcgctggcaggccccggtctacctgtggcaggtgtgtcacagtacctggtctcaggaaggtcgtatcactcagaccgtcggctgcttttttcctgaacgctgtaccccggatatcgtggcgacacagttacaaacgttggttgacccgttgcgcgagcgcgggatgcagcaactgttggagaagacggcccacgattttctttgtcgtctgtccgcgaacttgaaacaacaggggattgcgcactggcaacaggtcctgacgccgtggttagcggagtatggtgatgtggtgtcgctgcggggtttgatgttcagtttgccgcttaaagcgcagacgactcgcctcccgcaaatctggctgcccgacacggcatggcagggggtgttggagggcagtcgttgtttccacggtcggcgggtgggcatgctccacacacaagaccgttgtcgtggcctgaatatgctgggcttgtatggggggccggaatgatgctcttcttttttaccaaccgtgaccagctagctgtggtgcatgcggcggtcactgacctgaaagccagccggaaaattctgatgcccagttgattggcttaaagcgctgcgtaccaggtggaccggctgaagacccggctgacacggtga

SEQ ID NO: 5455 - DNA, 779 bp, Photorhabdus luminescens
  misc_feature (669)..(669): n is a, c, g, or t
  misc_feature (755)..(755): n is a, c, g, or t
aagctttcgctttttttgtcccagctactgtaagcgtccttaacctgattccactggacatcattgcggccttgaagatttttcagccattccgtaccgggagtgtgactcagtacccctaacgcgtcttccagtaactgcccctctttcactttcacatccgcattgatgcctgtcgccgcctccaccgtcagcgtaccgccaacatgcactgaggggattatccaagtctcctcacggtgacctttatcgcgctgtgtaataaaaaagccttttgatgtcgtgatgctctgctcaaaatcaatattgggcatcgccttgaagttcactttccctgtctggctggtgattttcgcgtttttaccggtttctatccgactcgcttccaatgtcacctcatcttttgccatcaggttaatatcacccccggccgtaaattccgtgactttgttggtcttcttgatttgtattctatgttcggttttagacccaaacactttacacgactttatgggccccaaacctttacagcttttctctgtttcttcccgcctgtagacttcttccatcgcttgcgcatagagaaagccacctgttgccgcatatccatcacccctttggcgattaacgccgtcgcctggaataaatactgccctgagagcgaatagntaatgcgccaccactattcagccgactggcgtgttgcgtaaagcgctcaatattcccctcgcggataaattctggtcgcgattcanagcgaacattgccacccgcggcca

SEQ ID NO: 5456 - DNA, 689 bp, Photorhabdus luminescens
gaaggcagcaaaggtaaagttcagctattaggttctggttctattctgcgtcatgttcgtgaagcggcacagattctggctaacgattatggtgtgggttctgatgtgtacagcgtgacctcattcactgaactggctcgtgatggtcaggattgtgaacggtggaacatgttgcacccaacagaaacgccacgtgtaccttatgttgctcagatcatgaatgaagcaccagcagtggcttctactgattatatgaagttgttcgcagaacaaattcgtaacttcatccctgcaagtgaattccgcgtattgggtactgacggtttcggtcgttccgatagccgtgaaaacctgcgtcatcattttgaagttgatgcttcttacgtggtagttgctgctttgggtgaattggctaagcgcggcgaaatcgctgtgagtgttgtggaagaagcaatcaacaaatacaacattaacccagaaaaagttaacccgcgtctggcataagaggtaaagaatcaatggctatcaaaattaaggtaccggatatcggtgcggacgaagttgaagtcaccgaaatcatggtgaaagttggcgatacagtggaagctgagcaatcgctgatcaccgtggaaggtgataaggcttcgatggaagttccatccccaggcgggtgttgttaagagatcata

SEQ ID NO: 5457 - DNA, 771 bp, Photorhabdus luminescens
aagctttatctaaagccctattgaatcgtacagtaagtttagctatatcaccatcatccaaaacatcctcacctgattgtgtcgcaataaaattagccacaacagatgatattgttgaggattggcgtaataccttatttaatacatgagtagaaacattctcaggtggaaatcccgtctttagattctgactttcttcatacttttcttgactcactatattagcattatcactaatagaaaaggctttaaaatcatttttttggctcatatactcctctttaattcaataatatcattcagtaatcaatatattaaattttcgtacagatagcctctctcaattgacgctaatgatagtctagttcagaaaaataataatgaaatttattttataacttatagggttaattatttttgtataattgacactaataaatcacccaacacactgcaataaaacacatccagattatttgcatttatcatcttttactttatccttacttattataactaaaaatcttcatgaaaatatttcatacctctattaaaaccaatgaaaaaatcatagtgacaaaaagctatttcatttgaaaattaacaaggccacactatcactgtggcctctaacacaggtaactcaccattaaaaatcattggctttccagcgaaaataaactggaaattccccttcaacatcccaccaataattgccttacccagaaaaccacaattgttttaagacccagcctcctggaatatagcaat

SEQ ID NO: 5458 - DNA, 684 bp, Photorhabdus luminescens
  misc_feature (202)..(202): n is a, c, g, or t
  misc_feature (344)..(344): n is a, c, g, or t
taatggcgctttttggttgaacgtcccaagatatccggccggctcattttataagagccggccatatttcattgcaggataatttgaaggagaatgataatgtcagattcattaaatgtatctattgttcgtcgcttttatgactctacgggtgatattgatgttcttcgccagattatggcgagtgatgttatttgggatnttactgaaggatctcggtatggtggggtttatgaaggaattgaagatatattgaataatttctttgtgccacttcttaatgatgttgatgaattcgttgtagatggttctgaatattttgagtcaaatgatcatgtcattgntctgggtaattatttgggacgggtgaagcgtggcaaacgattcattgctcgtttcgttcatatatggacagtgcgggatgggcagctagttaaattacaacaaactgccgatacgcttcaaattgaacgtgctcataccgattattccattcggtaatatgggctatcatgtttgaacattaactgagccaaaccatagcatacggcgggcataccggaggagtaggattgttaatcagaccaattaaccatttgattttacttcttgtatgtgacgaaattagtgacctgctacgcggtctttttattcacgctctgctattcttccataacatccttt

SEQ ID NO: 5459 - DNA, 776 bp, Photorhabdus luminescens
aagcttatgctccacccggtttttggggccttggattgatttacaaggatggtttggtagtaacagccacggtgttataccctatggatttcaagatgcttcgcggcggcaagggagtgaatccccgggagcataggtaacgatgtgaccggggtgagcgagtgcagccaacaaagaggcaacttgaaggataacgggtatagatatactttcgatacagaatcacaggctccatccacttttttcgttgaaatacaatatgtagatgaaccaacactaaaaacgatacaaactataggccctggtgattatctggtccgtagtaacggcggaataggaacagatagaatcaggtgtagaagtcattctataggacaaaacattagaattacttggtaatttattttaatatactgttaattgcagccctacccgaactttaagtagggctatattctgtaaaatcgttcagtatagtaggatcaaaattatgagaaatttattggttattatgttacttatatctgccataacagggtgttctagtaatccagataaacaagtacaaagagaagatggattgaaatttacattctcatccggtgataaatttatcttaacccgagcctgtacagatcaaatcgattatataggggtagatgaaggcggtaataaccaattagcaatagtggtaaaaaaaataaaccctgttttccctaccttgatacattaatcaataaaaatatcggctcccaagtgacaatatcattcaaagg

SEQ ID NO: 5460 - DNA, 693 bp, Photorhabdus luminescens
agcgaactgttaccggcgacagcctttgtcgaacacaccccgacaggtatgtatcgcgtgggcaagggcatttcctactctgaaacggccgcgggcggatcgagcagtcacggtcagtcccgggcacaactgattgcggcagcaggtacacagtccttgctgaccgatattccaatcgagaagaccctgacgcataccttgcagacacgcgggtacgatgtacacaacccggcgttgctctcacaagcactacgggatagcgagctcaaggggacgctggcaccaatgagtggcgattctgagcctcgtcaggtcagtgccaatatccatcagttcgccgccgatcctgtgttgttcgccaaatccaacactatcaataccgagacattaatcaggtcggggagtttcccagcagaagggaacgcccagctagtgaaaatcgaatcaggcttgtacgagctcgaatacactgatcgaagcgctaatgatgatgtagcagcaggcgctaacagcatacccgcgtattttctcgactacgacagcgccgatcaggccaatgcgtcaccagcctacgtagatattcctaagcatgcgatcgcggagagttttctatttaccgggacgctatcgggtggctcggtggtagtgaccaacctcgatgccatacctaccgggtctaccacgatggccgag

SEQ ID NO: 5461 - DNA, 774 bp, Photorhabdus luminescens
  misc_feature (742)..(742): n is a, c, g, or t
aagcttcagcgagcattttggctgagcgattaatgcagcaaccagaaagtacccaacgtcctagtttgacgggaaaatctattgttgaagaaatggaagaagtgcttgccgccagagaaaatctctattgtgaatgtgcgaaccatattattaatgcgcacctttcaccggaaaaaattacaacttatgtgaaagagattatgttctctggaatagtttcctgacactattttggtattttttatagagaaataagaatattacagtgtcgaataataaatagtatcttctatttattttttcaaatgggttgagatacgaatatgttgtttaaatttctaaggcttgtttttcgtttgatgtttcgtttaacagtagaaggagatattaaacaatttaaccacccaaaatgccttatcacgcctaatcatgtctcttttcttgatggtgttttgctaacactttttttgccggttaagccagtatttgctgtctattccaacattgcaaatcgtggctttatgaaactggtaagtcgctatgttgaaatagttcccttagacccaataaatccaatggctgtcaggatactggttaaggaaatagaaaaagggcggccaatagttgtttttcctgagggaagaatactgtgactggttctttgatgaaaatctatgatggggcagcttttattgcggcgatatttgaagccgttgtggttcctgttccttttgaagggtanaaagacccctattagccgataagggtatttca

SEQ ID NO: 5462 - DNA, 697 bp, Photorhabdus luminescens
accgattgatgacagaaaaaaaagagttcaccaaaagaaacctgatcaaagcagcagataaaatctactatgtccccgtcagcacgccacttaatatccagttagtgaatttccaacgtaataaggagaaggccgggctcatcgttgatgaatatggtgatattcaaggtctggtcactgttgaagatatcctcgaagagattgtcggtgattttacaacatcaatgtctccttctctggcagaagaagtttcaccacaaagcgatgggactattttggttgacgggacagccaatatccgcgaattaaataaagccttcaactgggcattgcctgttgatggaccacgaacggttaatggtatggtgcttgaagagttgggagaaatacccgcacttaatgtacaagtgcaaatcggcaaatataattttgaagtactttcagtgaacgataatgtcattaaacaagttcgcgtcactcccatcagcctattttctgatcaaaaagcacaagtcatttaaatcgctgcggaaaattgacaccgttggaggcgcgcacctccaacggcaaattcctgttaataatctcaggaacccgaatattatcactactatggaactacactttcaattcggtcagtttttcttctggcaatgctaactcatcattcttattaacgaggacgtctgaatcaaaa

SEQ ID NO: 5463 - DNA, 764 bp, Photorhabdus luminescens
  misc_feature (634)..(634): n is a, c, g, or t
aagcttctgatccggcaattaaagatttcagtgagtttgttgctaaacgggaaaagccaaccatgttcctctacttcggtgatcatcaacccaatatcagcctaaatcagtacaatggcgtattttcaaatccgggtcatattacccagtttactatgcgggataacttgcaacagggagaatctattcagactgatgaactgacggatatttcattccttggcggcatgattatggagagggctaaactggatgcttcatctttttaccgagcaaatatgacaatgcgtcatctctgccgaggagcgttggatgattgtcaggataaggcgctggtggagagttataaacactatatttatcagcaactagacgttgcaggtaaaaagtaagttatacccgttatctttcaagttgcctctttgttggctgcactcactcaccccggtcacatagttacctatgctcccggggatccgctcccttgccgtcgcgatgcatctcgaaatccatagggtatatatacccataatgtgagtaggtgccatatttatatggcgcttgctgtagataatgttgatgagaatgttaatcccacccaattttcaggcgctttgctctggcttgaaccctnccatatcgaattactgatatgaacgggaatctatcggaactggctctgacttcatgacacggatcaccgttcacaattcagagaattttgctcgatcctatcaatccacacctggctgttgaaaagtgct

SEQ ID NO: 5464 - DNA, 704 bp, Photorhabdus luminescens
ctactattgcgaacgttgttcgtaaattagaggagcatggtgctcttgccaatactattgtggttgttgcgactgcttcagaatctgcggcattacaatacctggcaccatattcgggttgtgcaatgggcgaatacttccgtgaccgcggtgaagatgcgctgattgtttatgatgatttgtctaagcaggctgtagcttatcgtcaaatttctctgttgctccgtcgtccgccaggacgtgaagcattcccaggtgacgttttctatctgcactctcgtctgctggaacgtgctgcacgtgttaatgctgaatatgtggaaaaattcaccaatggtgaagtgaaaggtaaaaccggttctctgacggccctgcctatcattgaaactcaggcaggtgatgtatcagcattcgtaccaacaaacgttatttcaattactgatggtcagattttcttggaatctagtttgttcaatgcggggattcgtccagcagttaacccagggatttccgtatcccgtgtaggtggcgctgctcagactaaaatcgttaagaaactgtctgggggcattcgtactgctctggctcaatatcgcgaactggcagcgttttctcagtttgcttctgaccttgatgatgcaacccgtaagcagttggatcatggtcaaaaagtaactgaattgctgaaccagaacagtatgcca

SEQ ID NO: 5465 - DNA, 785 bp, Photorhabdus luminescens
aagcttgacgaatcagtggcagatatttatgagcacgtttgtccaaatggtttggtaccagttgtatagtgacagaccaaatgacatgtaaaccggattggcgtttttgtaatttattggcaatcagataatctgcaaagtgtgttgctcgccattcccaacgaatcggttggccattattgtccataacttgtccataaaggaaaggttctttactgatctgaatatcgttagtatcagaataaagatcaactgaacctggatcatcacccattaataaggtcgtgataatggccttgcgtaaataggttgtagggtcaattggagaaattgtttcaattgtgatcgttccagcttcaaaattgatatggctgcgggtccggtattgatcggtatatttaacgtaatccttcgggcctgcaattaatacttcatgcaacccccaaatgttctcaattgttatgagctaacctggccccatcaaatatcaaaaccattggcatcttttatatattccttcgccggatttcactatttattgtgcgtgggacaggaaactaaaatttgggccataacaaaccaccgctacagtgtattcatactaaatcgccctctggtgcttcataccaccttatacacccccgctttgtcgaaagcttaacactttcttcccggtcgggggtttacattactccgattacctgaacctctaccaggaatttaataatccccccgccaccccatctacacatttctggattcctgccctcagctatctattcatt

SEQ ID NO: 5466 - DNA, 682 bp, Photorhabdus luminescens
  misc_feature (97)..(97): n is a, c, g, or t
  misc_feature (99)..(99): n is a, c, g, or t
tccattagcattaacaaggatttcatcaatgttgtagattctggatggaatatgactggccggtaatcgggtagctaagtttgaaagtagttcattntntctcgcagtacccacaacataagcaaccagttcatcaatctggtgaaactcagattttacactggtaacaacaacctgcttaatcccaggttcagcaagcaaggcattctcaatctctttaggctggattcgatatccacggattttgagctggcgatccacgcgcccgataaataaatagttgccttgctcgttttgtttaaccaaatcaccactggcataaaacctacgtccaaagatatcaacaaagtgagtttctgtcagatcttgatccccatgatagcctatggccagcgcacgccctcctatatataattgccccactttcccgggggaaactggccgcctggcgtcgaccaatacagctttttaaacaccattttagggcttaccgactggaattgaagactttgactaagcagatccatttaactaattcctttataccccaaataccccggcgaatggtcttactgttaaatatttaacaatgcgacttctagaataaattttatacttagtcctacgtacgttttctcaacaagatcgcgcttttaaagtgaacttagacaggtacgtgttt

SEQ ID NO: 5467 - DNA, 737 bp, Photorhabdus luminescens
  misc_feature (416)..(416): n is a, c, g, or t
aagcttgcccccattacaagcagcactgattctgatgaacatttctggtggtgattgcctggctatcgaaagagcggtgttagttgagggaaaacacagtgatttatcccaacggagtgcgactcaatctatacttgctgcactcggttgcagcaaatttgattactacactttctgagttcagtggaaaattcatttttccctctatgcagatagagggttttccgctataaaaaataattaccgtaacattttattatctaactctggatgttataccctatggatttcaagatggatcgcgacggcaagggagcgaatccccgggagcatacctccaattaagtaacatttactgtacatatttttcctatctcttaggatctgtagctaaccttattatccatttagttcanagagtaagattcatgggactggaacccgaaagtaaacgtccactatatatttcctattctggcccaattctgctggaattcccctgctgaataaggcaacgtttcacctaacaaaacgtaggaactttatcctcacggtattaccgaagcggccaaacctcgaaaacagctgaaccgcctatcgcatatcttattcaaaatgatgctataagccattatctccaattttccgacctacgaaccctttctacgctcctgtgccctttgacaaaaaagccacctgcccacccaacctggtaacttctacccttggcgtttgac

SEQ ID NO: 5468 - DNA, 689 bp, Photorhabdus luminescens
  misc_feature (652)..(652): n is a, c, g, or t
agtgaggatcaagaaaaagattatatccggattgcgacccgctctcgcttcggggtgatgcgtgtcgacgataaccgcacagaagagcaaaagcagtatgatgaagcatggcgaaaactttatcagcccagttcccaacactataaaaatccgatcccactggccccgctgctgcccggttcgcctcctgatgatgaagctttacccgctcctcccgcagagggtatgccggggactattccgcagccgttgacaaaaaaactcccgctggtcagtacttctccctggtcttttttacccagctatgaagactgggttatcctcgggcaggaggtggctggcctaacagaacaagggttggattatatccgcgacagtacccgcgaactccttgctcaatttggagcatggttaaatcaagctgggaagtgggtgtgtgaagagattattgacccgataagccatcaggccagctatgcgtttttctgggtcagcgcacaaaccggaaaaatcgtgacctggacggagagtgagataaaagcccggtggcagactgtgcaccaggttcggacattaccctggaagagctaaaaaactttagctggatgcagatattaaaagaagggggtgaatgaatgctggaaatggtatngatattgccgggttgcccttgtattcttgcacccttg

SEQ ID NO: 5469 - DNA, 780 bp, Photorhabdus luminescens
  misc_feature (775)..(775): n is a, c, g, or t
aagcttccgcttcttcaccaccacgcccaaacacataaggatcgcctccttttagccggacgacatttaacccttgttgcgcacactctaccaagatctgattaatttgctgttgcggcactgggtgatagttcggcgttttgccgacattaatcattttgcaatcatcaggtgcttcggataacaggtccgggctgactaatcgatcatacaccagcgcctcagcctgacggatacagtgtaatcctctgacagtaattagcgccgcatcgccgggaccggcaccgaccaaccaaacttttccgctattcatcatatttttcaccctgtaacgaaagtctgttggaagatatataaccgatagccagcaacacgatctggtgtaagatcaataattcttcatttttattaatgtattgacgataaccctcggttctgacgcattgttactttatctgcttgtttctcttagcaacttcgccctgcatcttgtatctacgccatttttattatgacccctaatatttttgtgaccacagttgattttccaaccaaattgccgatatttaatactgattgataaaaaaaaatgccaacatacgccttattgcagacaagaggcgtagcgatggaagccaaggagttattcagtgtcggtattgacatcggcaccaccaccacacaagtgatcttttcgcgtctgtcactggtgaaccgtgcagcggtatcacaagtgccacgctacgagtttgttcgccgcgagatcatctggcanagccc

SEQ ID NO: 5470 - DNA, 692 bp, Photorhabdus luminescens
tatgatgcggggtttagccatgaatatcgccgggcatgaatcgattgcggtgttctgtctgacgccgggaggggtcagactggtacatcgattgaaaactcatcttcctctgacctgttttaccagcgaaaagttactggagccggggtttacgccttttaatggcagctttggcgacacgttgcgtgaggcatttaaacactattcggcgttggtggtggtggcggcgctgggcatcacggtacgcctgcttgcgccacttataaatgacaagatgcatgatcccgctgtggtggtgattgatgaagggggtcagcatgttattagcctgttatccggtcatgtgggtggcgctaatgcattgactcaccatttggcggcgttattgggggctgatccggtgatcacaaccgccaccgatgttaatggcatggcggcgctggacacccttgccacgcaattagatgccgatatgcaggattttcgccacgtggtgaaggtgataaatcaaatgctggtcagtggtcaaaaagtggggttgtggtgggatgaaccactgcttagtgaacgtgagcagtgtgatatccggggttttgtctcggtagcgcgtctggaagaattgccagaactggatgcgctggtgtgtatcacattgcgagatgcattgcccgaattgcctctacccgtttaca

SEQ ID NO: 5471 - DNA, 766 bp, Photorhabdus luminescens
aagcttcgggtaacggcgcgtcaataggcggtctaaaagtgataacagaaaacggctggtttgctgctcgcccatcggggacagaagaagcctacaaaatttattgtgaaagcctgcttggccctgagcatcggcagaaaattgagcaggaagcactggatattgttaaccaggtttttgccgccggttgatctttttggccgattaaaaagaatccgcaacagtggtaacggcttttgcggattttttatttttcagcccagagcaaccattaatgcaccggcagtaatcagtgcaacaccacctgcggccatcagtgatattttttcaccaaataagataacggcgaagatgacggcaaacacgacactgagtttatcaattggggcaacctgagaaacatgaccgtttttaattgctagaaagtaaaacagccatgacaatgcccccgccacaccgcttaaaacgataaaaagcaatgccttgcggtttgccactatttcactcaccagatttaactttccctgtacgacaacaacgccgacaagaaacaacgccataatgactgcgcgtattgctgttgctgtattggcatcaagattttgcaacccgattttcccgaagatagcgactaaagcggcagtaaacgctgataataaggcatagataagccaggtactcatcgcgaataatcctatatacccgtcatctttcaagttgcctctttgttggctgcactcgctcacccgggtacatagtttgctat

SEQ ID NO: 5472 - DNA, 683 bp, Photorhabdus luminescens
gaatctctgcgggtgcattgtcaccgacatacaacgctttgcgacccagcgcctgttcgatacgtgcagctaactccaccggtgttattggctgttcaaattccccatgcggcacgaatggctcaaccaacccgaccactttcgcattaatcagacgggccaattgcacgttatttcccaatgatggatgggcatcaaggggcagatgataaccatataaattgatatcattacagagcagcgttttcaggcgattacgtttcataccacgaatcactgccggctcatttttccagaaatagccatgatggacgataacagcatcagcctgaaggcgaaccgcttcatccaataaagcctgacaagcggtcacaccagtaacaattcgctgaatatgagcacgcccctcaacttgtaaaccattgggggcataatcctgaaaatcaccaacattcagctcttggttaatgacattttccagctcaatattacgcatcatatttgtcctgtgtattgattgtatgacaataatataccgttacctgccgccaattgtcagttgtcagctacttttgattgccaaaacctgctctgactgttttaaccatacgggcttatcgctggtttttacccatacacgatacaaataactgtaaaaacgggcgcgatcacgacgaaacact

SEQ ID NO: 5473 - DNA, 807 bp, Photorhabdus luminescens
  misc_feature (658)..(658): n is a, c, g, or t
  misc_feature (687)..(687): n is a, c, g, or t
aagcttcacgttcacaaggtaataatatgtcgacttgtcggaaataatgacttgaccactgaataaggtccactacatagtcttttgaaaaacgcgagttaaaggggcttatccctattagcgcgtgatcacctttttgaataatttggtcacaacgagaggtttcaccttggacagtaaatgatggtgaattctcgtgcagcaatgttgaatgggctgataatatttgattgttcgtttcttttaagcatttttttcagtagataacatttccattgactttccattttttaatgtaattccacataatcctgtataaattacgctatttaacttgagatttatttaatctcttgtatcagtaatcctgtaggaaaattacgtatatacccgtcatctttcaagttgcttctgtgttggctacactcgctcaccccggtcacatagttctctatgctcccggggattctctcccttgccgccgcgatgcatcttgaaatccataggtatagactaataatatcatagtaaaaaataacatttaattactatccatgatatttaatttatccatctgagaaatatatctcattcattaaatgacttgtttgaaaaaacataagaatagtgtatgaatattatattctatgagcatcanatggaatgtaatatgaattaaatgcatangtacatagtttactagaattatagttagataacatatcgagattcagcggattcaattatcaagtaacgttctgttgatcgtaaagacgtctcttcgcgatacagatttatgctgtgttg

SEQ ID NO: 5474 - DNA, 702 bp, Photorhabdus luminescens
  misc_feature (663)..(663): n is a, c, g, or t
  misc_feature (673)..(673): n is a, c, g, or t
cgcttctatggcaatcattcttgtttcttgttctaccagttttgccagtgaaatcgttggtggtggcgacccagcacaccatcccgatattttcgctgccgaaggtaaagcaacggttgtgaatatcgtgacgccctcctcttccgggctgtcacataaccaatatctggattacaacgttggccagatgggcgtcgtcctaaataatgggctagaggaaggtcaatcacaattggcggggcagcttgccgctaaccctaatttgaatggtcaagcggctaacctgattctgaatgaagttatcagcaggaacccttccctgttattaggtcaacaggaagtgtttggtatcgcagcagattatgtactggcaaacccgaacggtatcacctgtaatggatgtggttttatcaatactaaccgcgcttctctggttgtgggtaatccattgatagaacaaggtaatttgcaaggtttcagtacgtttaataatcagaatagcctgaaaattaaatcggatggtttaatcgccaatgcgatccttgatcttatcgcacctaaaattgacaaccggggctcagtcactgctcaaaaagagattaatgcgatcagtggtgaaaataaaatctcagccacaggagaagtcattgattctcagcaagncgtaaccggngtgctggatagctattatctcggtagtat

SEQ ID NO: 5475 - DNA, 770 bp, Photorhabdus luminescens
aagcttgcacaacagaataacaacttatttggtatgcgttgcggtaacaactgtaagaaaacccaaggtaaaataaaaggttattccgcctatccgactatcaatgattcggtcaaagcctatatgagaaatatgaacacccataacgcttatgaatcattgcgtgcttcacgcgccaagcagagaagccttcaggaatcactcaataccagcaaattgattgataatcttgaaggatattcacaattgggttcgacttacaacaactacctgcacaaagtatttaacagcaataaagggcttattactcaggcgcagaagttagctaaaaacgatcacgactaagagcctgagtaagtcattagcatgaatatcttgtgtttgaatatttgtgctaagtaccaaaatcatccgttaccataaccaactatggaacggatgattttcttatgtccaccggtttattcttttcattgatagaatgtttaggttaaatactataatatcactcaatcttatattgagataaaatgatttaccagagtttaatatgaatttcttttcttttgagtttcctggttcctttggtgctttctttccccttgattggatgccacaaaaacatgcgacaacacaaaactacctgctgataatcgcaaggtatctgcttggcttttactttaatccgctttccccagcatccatttggctatacgctattatttatcctcaacaaccgtacccgaaattttatccaaccgcatacggtt

SEQ ID NO: 5476 - DNA, 688 bp, Photorhabdus luminescens
atctgacttttgctgatatgacgttaaatatgctggataccaaggaggtagcgtaatgaaagcacttaaatttaatcgggtgtgggatgtgcaaatccaggatgttgaaccgttacgctgtgctgagcctgatgatgttgttgttgatattgcggtgtgtggcgtttgtggtacggatgtcgggattatcaccggatcttatcctgttgctattccgggaaccacgctgggccatgaaacaacgggggttattacgcaaatagggaagagtgtcacgcgttttaatgtgggtgaccgtgttgtcatcaatccgacctattcttgtgggcattgtcggatgtgccagacaggcagtccaaatcattgtgagaaaaaattgggaaccgaagcaggggtttcctatgatggggcatttgctgagcaatatctggctaaagagagttcgctgataaagctggatgatcatgtcagtatggaagaggcatcattgactgagccactcagttgtacgctgaccggggttgataaactgggcattactcatactaatattcgtgcagcggtagctggcgcacgcccaatgaggatgctctacatttgggctttacatgccagaggcgttaagggcttcatggtcgagaaaacgaaagtcgattcaatttgcaaagaaatctgccacagatgtgaa

SEQ ID NO: 5477 - DNA, 780 bp, Photorhabdus luminescens
  misc_feature (717)..(717): n is a, c, g, or t
  misc_feature (758)..(758): n is a, c, g, or t
aagcttaagtgaacgaggaataaaatggaaggtactttaattatttgtgttgattcgattctgagatttcgttcagattacgatacgacaatcgctgtgccgatgttatcagttcaggaacagttaggtaaaaatgatccgttctttttcttgaaatatttcagaaataaggtcctaatagaaaaaggagtaacaatatcaaatatatttctcgcgatagaaccgtggcaggctatgctaagcacttggttggaaattgatatttctgcttacattgcagagattagaaagccttctcaagaagaaccgatatttgattggatcagcattcagagaatcacgtcggttcatcgggtatatcagcgaaaagatatgaaagataatgaaaaactgtctgaatattttaatcgtgaacatacgccgacaaaatattttaatattgaatcagtttgtatggcatcgggttataggaaaggcgataaagagcattacagtatcagtgaatatatccatgaaattaaaaatattccagtcattgccagtgacaggcaaatattaattggctatgatgataataatacggatattttgaatgataaatgttttggtatatatgataatagaaatatcaaatatatacagggaacaacctcgtttgcgttttatgaattgatggaagctatttttaatgatggcttattctacaattcaccgcanacagcttgtcatagcttagaaatgataaaagagatgttggnaattatagatcgcggaaatata

SEQ ID NO: 5478 - DNA, 691 bp, Photorhabdus luminescens
ctattcgccgggcggcggcaatgacatcatcataaacagaaatatttttcataggaataaccgtaagttatataaaatattagacaaaatatccacaccagaaaaattcgtcaatagtaaaggttgtgactaaattttgacttaccacaatacctataaataatacctataaataatacctataaataatgcctataaacaatgcctataaacaatacctatagttcagaatctctgtgcgcttgattaattatcgcttttgccatccatttagtgatctcaataatttccgcattatccatctgccagatatctttcatcaccagaaagacctcggagccataaattagggaaaaagaccgaatgacattttccaaaatatccggcggaaaatgcccttttaatggttcaacaaccattgccaggatatctttacgatgcccacgtaccaatttcttttcctgcttaccctcagataaacatccctgagcccattgttgcaaggaaactaacagagcagctcgcaatgcaccttcgtattgaaacattcggggataagcaaagtccaacaactccgtaatccgctcctcagtcttttcactagcaggcttccaagtgaggatcggcccaaggctggcaccaacaatcgcatcaattaaatcactttgtgtcggaaaatagcggtatgctg

SEQ ID NO: 5479 - DNA, 780 bp, Photorhabdus luminescens
aagcttgcatcctgatatcaatctgtccgtcgagtacgggtgagtcagcagtactttgcatatacagctcaaactcctgcaccagaaactgacctatccgcctggaggtggctagcgcatccggtgacgccatttttaccaacgtatgggccacttcggaatcaaaacgacgaccaaataagttgtcaatatattgggtagttgacttttctctgtgagcatcagcctgtaatgacagtaccaaaccatgtaactcagggtatgcctgtaactgactggcagcatcatcaaataacttgatagtttccttcgaggtgacttgtccggtgagccagagtcccctggcccgtccaatcaaaaacctcgcttccgggatattcgcggtttccaatcggctcataaaagcaatcagactttcactttcggtcttaggcgcttcccgttcagcggttgaattcgttcgggtcaacggggtaatctgccattcaataagacgattaatttcgttttgtgttataccgccttttaaaccgacaacacgtccggttccatcaaagatgacgcgttgcgtaagatgttcagcatgttgaggtgccacggcgatcccaaggacgccagcggattcagctcgctgagcctgtaagtgctctatcattcggcccattttaaaacgtactaagttcacctgattggtgcgtagagcaaactcctttgggctatgcctgtgccaatcagctaatcgccgttcaagcagcaatatatgctcttcatcgaaatgga

SEQ ID NO: 5480 - DNA, 692 bp, Photorhabdus luminescens
ataacgaattttttcgtgggcttgatattcgatctgctttaataaccgggtgatatcttggttaacaccgagtgtgttgagtgtcagcagtggggcgtctttctctacccgctgcccattctgaacatggatagcggtcacccggctctgttcgtatgcctgaattatctgagaacggccagagacaatcaggcgaccggttgcggttgcctgaacatccaacttacccagataggcccagagcaaggccatgataatgccgatactgagcgtgattgcagtgtagcgggcaaaaggtgacggtggtcgttgtgacaatgctaaatgtgtcggtaaaaagtcatagtgctgcggacaagggcgcaaccaggttttaattttattcttaaacgctttaatcatgacaaggcatctcctgttttaattcttgttgtaactgccagagcttccggtactgtctaccgtggttaagtagctgttcatgagagccttgttcgagaatttccccctgtttaagaacaatgatgcgatcacaatgacgtacagttgaaaggcggtgtgcgatggtgataaccgttctgccttgggcaatttctgccatatttgattgaatgcgtgattgtgactcgtcatcaagcgcactggttgcttcatcaagaatgaggattttggggtcagcgaggaaagttcgg

SEQ ID NO: 5481 - DNA, 773 bp, Photorhabdus luminescens
  misc_feature (773)..(773): n is a, c, g, or t
aagctttacccgtaccgcccgcagagggtgtgccggggaccattccgcaacccctgacaaaaaatccaccgcttctcagtacttcccgttggtcgtttttacccagctatgaagactgggttgttcttgggcaggaggtggctggtctgactgaaaatgggttgaattatgtccgcgacagtacccgggagctccttgcccagtttggtacctggttaaatcaagctgggaagtgggtgtgtgaagagattattgatccgataagccatcagatcagttacgcgttttcctgggtcagtgaacaaacgggaaaaatcgtgacctggacggagagtgagataaaagcccggtggcagacggtgcaacagggttcagatatcaccctggaagagttaaaaaacattagctggatgcagatattaaaagaggtgggggaaggcatgctggaaatggtggtgattattgccggtgttgccgttgttatcctggtcacccttgccgttgctgctgcgctgattgcactggtggaaattttagccgcggctgctgcggtaagcgccgctgcgttggctaccgttctggcaatattggcgagtgtgacattcgccaccgcttcataattaacggagagaaaatatggaaactgtagattactttgcccagttgaaatcacaactaaccgcgtttaccttcctcaatggcgatggactgactgtttctcgtctgggtctctctattactctgttttttaacagggttacccctagagaaan

SEQ ID NO: 5482 - DNA, 690 bp, Photorhabdus luminescens
atgcttaccgtacgccagtcctgacttcccgcactgctaatgaaatgacaggagccaggttatttttcaaatgtgaaaattatcagcgaatgggagcctttaaatttcgtggtgcttttaatgcgttatcacaatttaatgatgaacagcgccgcaatggggttgtcacttattcatcgggtaatcatgctcaggcaatttcattggcggctcgtatactgaatatttcggcgacaatcatcatgccgttcgatgcgccagtggctaaggtcgccgcgaccgaaggttatggtggcaaaattgttttctatgatcgttatacggacgatcgtgaacaaattagccgtgaattatcagaaaagcagggattgaccttaattcctccctatgatcatccgcatattattgccggacagggaactgcggcaaaagagttgtttgaagaggtcggtgaactgaatgcgttgtttgtctgtctcggtggaggagggctgctttcaggcagtgcgcttgcagctcgccatttctctcctgaatgtaaaatttatggtgtagaaccggaaaccggtaatgacgctcagcaatcatttcgtcagggcaaaattattcacatcgatacgcctaaaactattgctgatggcgcacaaactcaacatcttgggcaatatactttcgatattattcgaaaaa

SEQ ID NO: 5483 - DNA, 789 bp, Photorhabdus luminescens
aagcttacgtaaggcaactacaccacctaatataatttcagaagccttaccagtagatgaagattcaagactaacgctattaaaaacatcaccaacgacagatgcgataccaaagccattattaaatacagggattgaagatgcgttagaccagctaattcttgaacgtaaaaacattaataaactagaaaaaatcggattacaaccgacccgttcagctatctttgttggtcctcccggggtaggtaaaacattaacggcaagctggctagcccaaaaattaggcgtgcctttctatgtacttgacctaacagcagtaatgagtagttatttaggcaaaagtggtaataaccttagagcagccttagattttgccaaaagaggtccatgtgttttattactagatgaaatcgattcaatagctaaaaaaagaagtgacgattcggatgttggcgaacttaaacgtttagttacagtgattcttcaagaagtcgatcaatggccttcgtctagcgtgttacttgctgcgacaaactatgaagagcttatcgatcccgcattgtggagaagatttgaccttgtacttcattttgaaaaacctgatagcgaaacaataaagaagctatacaacgctttctaggttcaaattatgccatttttgctcgatggatcgatattctttggatccctgtttaaaatgagtctttcagcaatattgaaccgtcaattaacaaatttcgtcgtttcataactttaggtatcgcatctgatgacgtactaattgaagaa

SEQ ID NO: 5484 - DNA, 706 bp, Photorhabdus luminescens
taggcttccccgttgtggcctgtctcttgatcagatctccaaatcaactgatttagccagcaaatagccgtctatcagggtttgcagccgaaaccagccttcccaaagtcgttcccatccgactcgacccgtgcgtttggaatcgtaccagccggccagttttcccagattgatgaaggcccaatgcaaactcggggcttttttcggcacacggcgtttttcttgttttgaccacagtaatttccacgccagggggcttaatactgtctcacagctctctttctctgcctcttctttgttcagacccataaaacgcagctggtgtattcgtaccgcaataaaggccagcagcactatcatgcgctccagattatctttgctttgcatacgcagcgcttctacctgcgtgccgcccgttttccacgctttgtgaaattcttctatcagccagcggcgctcgtaataactgaatattttatgggcgtcttcctgactgttgacgggttcggaggtcagaagatgccagcaaagcccatcctccggacctttttcgtagcaaccgacataaaatatccgcaccgcctcaccgctttttccttcggggattttcacgtcacttcggcataactgatatcacaatgcgcgacacgcgcctgacgcccgcctttctgtctgacctgaactaatacgtctccagcactctgta

SEQ ID NO: 5485 - DNA, 707 bp, Photorhabdus luminescens
  misc_feature (574)..(574): n is a, c, g, or t
  misc_feature (593)..(593): n is a, c, g, or t
gtgcgataccataacgaaagaattgattcacaaacttaactaagactactgcatgattaatacagaaaccttcgacacccacacgcccatgatgcagcaatatctccgtcttaaagcacagcatcctgatatcctgctgttttacagaatgggggatttctatgagctattttatgacgatgccaaaaaggctgcaaaattgctggatatttccctgaccaaacgaggtcaatccgctggcaatcctatccctatggcaggcgtgccacatcatgcagtagaaaactatttagctaagctggttcaattaggtgaatcagtcgctatctgtgagcaaattggcgatcctgccaccagcaaaggcccggttgaacgtaaagtcgttcgcatcgttactcccggtaccgtgacagatgaagcgctattacaggaacggcaagataatctgctggcggctatttggcacgataatcaaggctttggttatgccacactggatgtgacatctggccgcttccaaatatctgaaatgatagagctggaaacgatagccgctgaattgcaacgtagccgncctgttgaattactctatncctgaaagtttgagcatatggcgctaattgaaaattttcatggcctgcgccgtcgccctctatgggaatttgagctagataccgccaaacaggcattgaacctgcattttggtc

SEQ ID NO: 5486 - DNA, 799 bp, Photorhabdus luminescens
aagcttgcccattttgatcgtgaagtgatcccagagcgccgtatgcatgccaaaggttctggagctcatggtgtctttgtggttactcacgatattactaagtacactcgcgctaagattttttctgaaataggcaaaaaaaccgagatgtttgcccgtttctcaactgtcgccggtgaacgcggcgcagcagatgctgaacgtgatattcgtggttttgcgctcaagttctatacggaagaaggaaactgggatttagtcggcaacaataccccgatattctatctccgtgatccactgaagttcccggatcttaaccatgttgttaaacgcgatccccacactaacttacgtaatcctgcctataagtgggattttttctctcatcaacctgaatcactgcaccaattaacgattgatttcagtgaccgtggtgtacctaagtctttccgccatatgcacggttttggtagccatactttcagctttatcaacgcagataatgaacgtttctgggtgaaattccatttccgttgtcagcaaggcattaaaaacctgatggacgaagaagcagaagcgctggtgggtaaagatcgtgaaagttctcaacgtgacttgtttgcagcatttgagcaaggagattatccacgctggaaattaccagttcaaatcatgcccgagaaagaagctaacttgttaccgcacaacccgtttgatttgaccaaagtctgggctacagggactaccccatgattgatgtcggttatctccagcttaaacccatttctgataatatttt

SEQ ID NO: 5487 - DNA, 712 bp, Photorhabdus luminescens
ccgactacagcgatccaattaacgcctgatttcgaaatgggggaatttaagcgtcaggatttggtatatgaaaaagaggagctgacgatttcaggtccgggtaaatatcctgattataacttttaccgtaagacaggtgtggcaattgacggcaaatcaaaaggtgaagccgacaatgaagcgaaacctatcgacgttaaaagcctgttgccgtaaggagcgatattcatggaatttacgttttataccgctgggctgattgccatattggcaactatcagggtaattacccataccaatccgatacatgcgcttttgtatctgatcgtttctctgctggcgctttcagcggtgtttttttcgctgggcgcttattttgccggtgcgctagagatcatcgtttacgccggggctattatggtgctgttcgttttcgtggtgatgatgcttaaccttggcaaatctgttgttgaacaggagcgtgtttggttgaaaccgcggacgtggattggtccgggaatactgtcaacaatgctgcttgttgtgctggtgtataccattatcaatgtttctcatggggatattgccgacaatatcacgggtgaagttgtcagtgccaaagaagtgggtatcagtttgtttggtccgtatgtattggccgttgaactggcttctttgctgttgcttgccggtatggtgggtgggtatcaca

SEQ ID NO: 5488 - DNA, 698 bp, Photorhabdus luminescens
tgacgcctttatatcatatatggaaaacagcaacgatttttgggctataaaagacagggaacatcgattcgtctatgccaatgatactatgctttattacagcggtcttcctaagggttttagcatagaagggaggcttgatggtgagtgtccagcaccgtggtctgagtttgaaaatattatacaagcgagttgtgatgttgtaatgacgagtcaaaaaaccattccagtattaaacaccttgacttatggtgggaaacaaaaaatgatccaaccatttctgaccaatgttacaccgctaatgaaggatggagaatgcattggcattgttggacacggcaaaaaacttgaaatttactccatgtatcattttgaaaataacattcatccagagtcattaacttttggcaaaccaactgatttatttaccgacagagagttcgatatagtattttttgcattgcaatcgctaagcgctaaagacatagcgagaaaattaggtattacctatagaacggtacaaagtaggttacaatttatttaccaaaaaatagggataaattcattaagccagttaacagaatattgcagaggtaaggggtatgataactatgctcctacccgatttattaacccgaatccctatataactctagcataccaatgaccactcctcactgtccattagggtctgccaa

SEQ ID NO: 5489 - DNA, 708 bp, Photorhabdus luminescens
  misc_feature (166)..(166): n is a, c, g, or t
  misc_feature (307)..(307): n is a, c, g, or t
  misc_feature (319)..(319): n is a, c, g, or t
  misc_feature (352)..(352): n is a, c, g, or t
  misc_feature (401)..(401): n is a, c, g, or t
  misc_feature (411)..(411): n is a, c, g, or t
  misc_feature (417)..(417): n is a, c, g, or t
tggagcaaacgccggagacaccgatacgggccttgaatatcctacccgaaacggaacgcacgctgttactggaaacctggaacgccacggaaaccgtctatcctgatgcgctatgtattcatcaattgtttgagcagcaagtggagagaaccccagaggcgacggngttgatagcgggcgataaaaccctaagttatatggaactgaatacgtgtgctaaccggttggcttatcagctaatcgaacaggggattcgtccggatgaccatgttgcgctcctgttagaacgatcgatagaactggtggnggcccaattggntattctcaaagctggcgctgtttacgtgccggntgatcccagtatgccggatgagcggaaacattggctgataagtgattgntccgctcggntgctgntcactgatacacgggctgatattccggctaacttgactattccgctgttgcgtctctcggataagaaaagtgcgaacagagagcatgatcatgtcaaccctaatttgccgcgttccagagccgaattagcgtatatcatgtacacctccggctctaccggcacacccaaaggggttttggtacaacatcgcgcgatggtccgggtggtcataaataatggctatgccaacatccgaccggaggatcgggttgccttaccgttaatccgggtttccatgcagcacgttgaaa

SEQ ID NO: 5490 - DNA, 785 bp, Photorhabdus luminescens
  misc_feature (779)..(779): n is a, c, g, or t
aagcttgttaattttaatgacaatttttccgattctatcctttagccccttttgactatcatttaatttgtcagttttaagcataacaaaagaaataaagtcatccttatttacgccttcacttaattgattagatttaataaaatcagaatacttagataaatgtaccaccaatttaaaacgttcattttctaggtcaattattttcttattaagctctatttgattaactcttgactttatcgactcttttatgtcctcaatctctttagatatagaatgctctctatctctttcacattgcacttttgaaatcaaatgttttgaatagtcatactttgacataaacattacagatgagttaaatttatttatttcagatataaagatatttttactttctacaagagtagattttttctgagaagattcatttattaaattctccaaggaagaaatttcatcttttaaaccatttgatattgattttttcttttcaataaattcaacattaaatctatccaacttcatagataattgttctagttcttccatcaatgaacttttcgaggcattttttttcttttctatatctgatagcatagaattgttattaattctagaaataagctcatcataggtttcgttatctcgctcacataaaggacagtgagattgttttgtacttatgacaatactacttgctttatctattaaaaaagatatgtcagtttgctgctgatctatactttctaaactctttattattggatttattntaccat

SEQ ID NO: 5491 - DNA, 697 bp, Photorhabdus luminescens
  misc_feature (609)..(609): n is a, c, g, or t
cacagcgtccacctttaacgttaaaactgaatcgtccaggtgtataaccacgggtgcgtgattcaggtacgcctgcgaataattcacgaactggtgtaaatacgccggtataagttgctgggttagagcggggagttcggccaatcgggctctggtcaatatcaatcactttatcgaaatgctctagcccttgaatatcaatataaggtgcaggggtgatattggtcgcgccatttaactggcgttgggcaatcgggaacagagtatcattgattagcgttgatttaccggaaccagaaaccccggtaatacaagtaaataacccaactggcagattgaacgtcacatttttcaggttattacctttcgctccgatcagtttcagcacctttttcggatctgccgagatacgcttctctgggatggcaatttcacgctctccactcaggaattgacctgttagtgaatctttgctcaccataatatctttaactgagccttccgcgacgatttcaccgccatgtacacctgcaccggggccgatatcaatgatatggtcggcagcccggatggcatcctcatcatgctcaaccacaatcacggtatttnccagattgcgcaagtggattagtgtttctagtaggcgttcattatcccgctgatgcaacccgatagaaggttcatcaagtacatacat

SEQ ID NO: 5492 - DNA, 769 bp, Photorhabdus luminescens
  misc_feature (647)..(647): n is a, c, g, or t
aagcttaatcggcttgctggggataaaagatattgaaaaatttgaaagtctgcttagagatggtgttgaaaacgcatattatattaagccaccgattaagaaaaaaaacggtggtgaacgaattgtttatgcaccaaatcgaatgcttaaatcaattcttcgaaaaataaacaatagaatatttaatcaaattaatttccctgattatttgtatggttcaataccagacaaagaaaaccctcgcgattacattttatgtgctcatcaacattgtaaagcaaaaattcttatcaaacttgatattgaaaattttttccctacaatgaaaacaaaatttgttttcaatatattcaaagacttatttaagttttctgatgaagtatcaaacattttaacaaagcttactacgtatgatggttttgttccacaaggtgccccaacaagtacttatttagcaaacttatatttttatgattgtgagccaaataaggtaaattacctacgtagtctcggtttcagatacactcgtttaattgacgatataacagtatctcgcttaaaaaaagaaggtgattggaaatttgttgaaactatcatttcagaatttataacgcagaaagaattatcagtgaataaagataagactncattattatcagctaattcaccacaatcgtttaaagtacatggactatgtatagaagaaacaactccacgatttaccaagaatggaagaatatatataaaacacccgttaagcgagttgtaa

SEQ ID NO: 5493 - DNA, 685 bp, Photorhabdus luminescens
atcagggggacgaggtatataactttttcgataatctactgccggataatccggaaatcagaagaagaattgttgccaggcacaatgctgaatcaacgcaaccttttgatctgctggctaaagttggccaagatagtgtaggtgctttgcaattggtaccgcaaggtacatccgctaatgatatcaagaggattgaatacaagcccttatccaaggtggaactagagaaagtgctaactggctaccaagctggtgcgccattggggatgatcgaagaagaggaagattttcgtatatccattgctggcgcacaggaaaagacagcgcttttaaatattgatggaaattggtgtttgccattaaatgccacgccgacaacacacatcattaaacttcccattggtaaaattgagagtcattcacattccattgatatgtctgaaagtgtggaaaatgaatatctgtgcatgttgattgccaggatgtttgggctgtctgttcctcactgcttaataatgaaagtgggagagataaaagcattagcggtagaacgatttgatcgcaagtactcatctgacaacagttggataatgcggctgcctcaggaagatttctgccaaaccttgagcgtgccttcggcgaaaaagtatgagagtcatggtggccctgggattcccgagatcag

SEQ ID NO: 5494 - DNA, 764 bp, Photorhabdus luminescens
  misc_feature (727)..(727): n is a, c, g, or t
aagcttagtgtattggtggatttttttgcatcacgtggtttccctatagtggtaaacttcaactatggaacctcttttaaaggtgcgcttgatgatgtaagtggcgcgattgatctgctactaccgatacttgagcggcacggcctcaaagagcggactcttgaaattaccttggaaaatggcaaagttattaaaagccttcgtaatggctattggttccacattgacggtgctttgggggctgcgtatggtccgtttttagagaaagcgagagagcagggaatagatattggtgagggacatcttccttcatttgatttcagaaacccagttcattctatcgtgaccagcggacacaaagaaatgggtgctccgtggcctaccggcatttattcttccaaatgaaaggttaaaaccaccggctttagccggtcagctttagctgcgatactgtgttgtaccggaggtgcaacatggattacagatatggcagccacacggtatttcagattgaataccattttgtgtgggtaacgaaatacagatacaaagtgctgacaggagaagtggcaagtcgagtgcgagaattaatccgtcagacatgcggctcctttgaaatcagaatattaaagggagttgtgagtcaagatcacgtgcatatactcgtcagcagtcccccaacattagcgccaagtgaaatcatgagaaggctgaaggggagaacggncagtaagctgtttgaagaatttcgcattcgtaaagcg

SEQ ID NO: 5495 - DNA, 675 bp, Photorhabdus luminescens
  misc_feature (641)..(641): n is a, c, g, or t
atgacgggtaaaaccaaaaccaagtcgattgtagcgccctagatcgctaggcatagagggtatccccatcctttcaaggtatgaaggagatcctaccacaaccattcgacttgcccccaacttgcgtaccatgaaacatgaatcgtccagaggaccggtacgaatcgccacatcactacgatcatcaagtaaatccactatcaagtcacataatgagatgtcgagtgtgatctctggataacgttgcaggaaatccggtagtaaaggcatcaagcaatgttttccaaacgcaacatgacaattcacacgtatccgtccacgtagcgcggttccctgatttgcttcttgttctgcggctatgatgtcctccaaaattctgacactacgttcatagaaaacagaaccttcagccgttaactgaagtttacgtgtcgttctattcagcagccgtacaccaagtcgcatctcaagtcgattaataagcttactgactgctgacggcgtcatatcgagcttacgagcagcagcagagagaccttccgactcaattacttgaacgaatacagccatttcggtggatcgattaaatttgtgcatagatatttgaattattttccaaagtcctatggataaatgaattntagtctaataagctcattttttctaagttaagga

SEQ ID NO: 5496 - DNA, 783 bp, Photorhabdus luminescens
aagcttatcttcttctctatctaccgcctgtatcctgacatcaatgccgggataagctaaattaaagctggacagccttggaaccaaccactggatagcaaagctaggtgaaaggctaaccgtcaaagcacctttagcacttctagcttgaagtttacgtgttgcttcatttatcgccgtgaatatctctttaatgtccagatagtagctttgaccttcttcagtcaacaatagtgatcgattgcggcgacgaaataacttcaacccaagaaaatcctccagacttttcatctgatggctaactgcggcctgcgtcacaaataattcttctgccgccttagtaaaacttaaatggcgcgctgcggcatcaaaaacccgcaacgcattaagtggaggtaaacgtttggacatgtgagcccttatgtaatgttggagataccggtaactctttatatttagttattagtttttgtaatccgaatcattataaattgtccattgaggatacaccagtaaatccctatagtggcgccacttcctaagccggaacgaaaagtgaatcagcttaacgctatgaaacttttggctttgtggttgtgatgttgtgtttgcaagttgtctgggaaaccggaccctgtagctcaagctactgttttttcacttcctgtacatttaccctgtctgtccatagtgattttttaatgcaccgcagttgcggtgcttttttttggataaggcgtggaacatggcaatattattccatgtaataacctataccctatg

SEQ ID NO: 5497 - DNA, 686 bp, Photorhabdus luminescens
  misc_feature (315)..(315): n is a, c, g, or t
  misc_feature (469)..(469): n is a, c, g, or t
  misc_feature (535)..(535): n is a, c, g, or t
  misc_feature (622)..(622): n is a, c, g, or t
tgccagtgtttcggtgacatatctaccgttttcttgattcaattcgccagcgattgcgggcacatgaagaggaactggcagtattgtcaatgtcccggcagcctgtggctcgggggttttgtcagcagaatattcttgtagttgcaaaggtaaattaagttgtctggctctgtcgagaagcaggttggggtctgcgcaagcgaccaattgcattggccaactttgttgagcaagagccactgttaaatcaggcccaaccccggcaggctcgccgggggtaataacaattggtttattgataataatcggtttatngttgtgcatcgttgccatctaaaattttcacataagctgaggcgcgttgttcctgcatccagctttgtgcttcttcggtgaatttacggttgaacaacatacggtaagcacgatctttctgagcgacatctgttttatcaactttgcgagtgtncagtagttggatcagatgccaaccaaaagatgagtgaactggctgactgatttcacctttgttcantcgcattaatgcgtcacggagagcacgattcttgatatcaggagctcgccaatcatatcaccccactccaggcggatcctggatcgnctgaaaactctctggcggatttgcaaaccattttttcactgcgaattcaatggcattagtgcaa

SEQ ID NO: 5498 - DNA, 800 bp, Photorhabdus luminescens
  misc_feature (646)..(646): n is a, c, g, or t
  misc_feature (685)..(685): n is a, c, g, or t
aagcttgaatctgtatttacgtctccagattggccaacattaaccactatcaaaaacttcagtaagatcgccgataaccgcaaattctatcaggaaatcaatgctgagacggcggatgggcgcaatctatttaaacactacagtgagcaaactttccaacttgccagtggtgcaacctatcctacgacttatactttgtccgaagcggatttctctactgatccggataaaaactacctacaggtttgtttgaacgttgtttgggatcattatgaccgaccatcagggagaaaaggggcctattcctgggtcagcaagtggtttaacgtgtatgttgagttgcaagatagcaaagctccggatgccattcctcgattgatttcccgttacgatagcaagcgtggtctggtgcaatatttagacttctggacctcatcattacctgcgaaaactcgtcttaacaccacctttgtgcgtactttgattgagaaggctaatctgggattggatagtttgctggattacaccttgcaggcagatccttctctggaggccgatctggtcactgacggcaaaagtgagccgatggactttgatggttcaaacggtctctatttctgggagttattctctcactcgccgcccntagtagctacacgctttgtcaacgaacaagcattatttntggcacggaacaaaagaggtttgcatcacatctcttgatccggcgaataaaaaaccagccccacaatgctccgggttactggaaatgtacgtccgttggttgaagtccacagcat

SEQ ID NO: 5499 - DNA, 708 bp, Photorhabdus luminescens
  misc_feature (552)..(552): n is a, c, g, or t
  misc_feature (626)..(626): n is a, c, g, or t
catcacgttaatcgtatcacgatgactgaaaatactgagacgcacactattaccgatgaccaaaaacagcgcaacgatcatcaaaataccgattactgtcacaatctgaccgataagaccagtcagcgccgccagacgggcaaaccagctatcatccatccgaacttcttcaatacctttaacctgagaaactctatcacgcagcgtggtcagcgtctgtgaactctgaaaatcgattttcggtgtgataatagccaccgcgggcaacggattctcttccaacatatccaacgcgccaccaaagccagaccaagcgcggaattctgtcattgcttcctgacgtgagagatagttgacattgtccacaccatcaagcgctttcaactcacttattaatttctgcgcactgctatcatccagtgatttatcgagatataccgtcagttgaggggtgggataccatttttccgcagcctggctgacattcttccacacaatgtaacaaacacttggtaatgtcagggagatagcaatcaccatcacggtcaacanagttgccaacggctgacgtgacatatctgtcaacgtattcatccaagcatagcgccactgctcacgccatcctncttgtaaaactttacttctcgatcgtgttacttttcccgctgccttacgcacatttttaaccattatactctcccgccatag

SEQ ID NO: 5500 - DNA, 779 bp, Photorhabdus luminescens
  misc_feature (593)..(593): n is a, c, g, or t
  misc_feature (627)..(627): n is a, c, g, or t
aagctttaaatattcataaagccttctttatacgttctgagagaaataatttccagtttacgtctaatcttattttgacgagttacgctatagcaaccgcgattgaactcaaatgtgaaaagttgtcgctggaaccctaagtgggttaccggatttgctatgagctgtttccgaatatcagaattaaactaaaaggatagctagaataggaaaaacttgagtttcatcgcattattccagaagcaggtaactaattaattacaaatctacttttgattttcgttaaaaatggaggaattacttaaaaaatttatttaatggaatacgaacatgtttacttccagattaacaatgttgcacttaattatgtgaatctacccattttaaattttttaatgggctatttcgtatattcgatctcattcacgtaccacaacacttttcctgttggtgtatgaacgattgcactgtctccaacttctttcttcaataaagcccgggccattggagaatcgatggatatgtaatctttgcgaccaaaaatttcgtcgtacccgacaatacggaagcgtttaatctcaccttgatcattntcgatctctacccatgcaccgaagaacactcgtncatcttgttgaggggagtaatcaacacacccgcatttcttctaagctttttggttaaatatcggactctgcgatcaatctcccgtagactctttttgtatattgataatctgcgtttcacttcggtcacccaagcttgctgcccaagtactt

SEQ ID NO: 5501 - DNA, 697 bp, Photorhabdus luminescens
  misc_feature (231)..(231): n is a, c, g, or t
attcaacttcgttacgtgtgactatgacggaaattcttgatcgtcacccatcccccggtcgtgatcgcagtgaggatctttattttggtgtgctaagtttccccgtagagagccacattatttactaccgggaagttccgacgggtattgaagtgttggcggtgttgcatcaaacgcaagatccacataatcatctataccctatggatttcaagatgcatcgcgacggcnagggagcaaatccccgggagcatagagaacgatgtgaccggggtgagcgagtgcagccaacaaagaggcaacttgaaagatgacgggtatataatgaagagcataaaacgtgggatactttatttaattcgcaataaaataagcagctaaacttttgtatcagatgcttgagtgagttacccgagcgccgttttacttagaaacctgagttgtcgaactatttcatccggatctcaccaaaattccggctggaggtcaagaaaagctgttttgtacgacgaaggaaattcaaacgtatccctccattttcaccgggggattggtattggaaagagagtggatcttagggattatcttggtaaaaactgcccacaagaacctgtttattacattttcatctggacattattctctaatcctgcgggaagagcctacattctcttctcaacagaatggagtcttgcaa

SEQ ID NO: 5502 - DNA, 770 bp, Photorhabdus luminescens
  misc_feature (685)..(685): n is a, c, g, or t
aagcttctgccgatgccggcaatctagtgccagccgaccaagttgaagctaaatttttagcccgccgcaaagccacacttcgccgttttgaggccaagtaatgcaattattttggacgccagaagccattcaagaccgtgaggaaatatataccttatggatttcaagatgcatcgcgacggcaagggagcgaatccccgggagcatagcaaactatataaccggggtgagtgagtgcagtcaacaaagaggcaacttgaaagatgacgggtataaacaacaatcttttatttaaggggtaaacccttttaatttaattaggaataaaatcaatataaaaaaacaaatagaaactaatcttcatttctataatcacatttaaaacagagaaagaattttattaaaaaataaattccaatcatcataaaatttatatctgatttcatcataaaaaattgaactctactggacgcaaccttatttttcctcttaaaatataagactttcccttgacgacataagaataaacacttatattttgagtatccaaagcggatatgctcttttaaaatagggaaagaaatggttaaagtcatttggtctaaagctgcaatcaaaccgctaacgaggatcgatactcgatatccgaagacgattaaacaaaggtgagttcgctacagatttnctcttgttgctctggtatcaaaaaattcaggattcgtaacgatatagctcagagttgcgattatcggttttgttgattactggag

SEQ ID NO: 5503 - DNA, 704 bp, Photorhabdus luminescens
caaaacgcccgatttttacctgccagtttttctcattgccgaagaagaaagcggcgtcgtcgagattcattttgccagtcatgtctgctaatggttgcactctaaagccggcaaagttgttgttttgatcacggtggtaaccgtccagcccgatcaaaatgcggccattaacattccaacgctctttgtcgccaggtttccagtctttattatcgctggttttaagtgaagtaagctgaccggttcggctggcgctatcgagattgaattctacatcgccatacaattttagatcgccaaaatcattcaatttcaagttgctggttgatggagcactattttcctgcgaagtggggtgttgtgctacttgtgtggtctgttgtttggtttcgatagcgcgttgttctagttgctgtgcgtgttgctcggcggcagtggcgcgcgcttccgcttgggcggctcgttgttctgcttgttgtagtcgctgctccagtgcatcaaggcgtgcttcgatgctattagcaggtgaagcaaggactgaggccgaaagcattaatcctggtgtgacaatcagatagcgaaggttcttcatgatactgtactctttaggatattagttattatatcgtacctaaattatcaagctggtttttttggattaaaagataattgagttgattggcagatcgcaatcaagtcgacta

SEQ ID NO: 5504 - DNA, 787 bp, Photorhabdus luminescens
aagcttgcagaaaaagtaaagaggaataacattattaaatccggaattggtaagttctttgtataatctgctttcaggtggacaagcaatcagcagctttcctttattataatcaaaatatttaactatattcatgatatatgtggtatgaccgccgccattccctgtatggaaatttgttatcataatattcattgctcacctactcttatctttgtcatgagttaattttatctagaaatcaaaaccaacatagatcttatttatatttctcataatataaaaattcattcaggaattttatcttccggtaatgagctatatttcatgaccttattactaaagttcagaacatcatcttgattttcacatatttcattagacaacattttacaattctcaggtattgtagactctttaatacctgtccaatctgaaaatagtgttaagaaattcattgaattgcgttgaacattaataatattacgtgacgtatcatcgtaagatgtaataaacataggaacctgataatcttgcttatatttatcattatgagcaagcctcatcttcttactatctttctcaaagaaagaaactccgtgatcagcaaaatacatcaaagaccaattcttctcatttttttgtgcttcatcagctattattgataacaagtcatcggtattttcaatactctgtatatagcaagaaacctggtctgacttaagaataccttgtattctaatttggtctggacagaaggggagtgagaacccttaatggtaacaat

SEQ ID NO: 5505 - DNA, 711 bp, Photorhabdus luminescens
gtttacccaagcacagggtgagttattgctgtttgatggaggtatttttgatgagcaacggtagtgataaagcgggttggttaacacctgtcacgcttgggcctgaatacgatgatgagctggagcacatactgagtcgttggctaggcggtgtttctggtttgcctgacgataaagtgcattctcaatggacatcagcacaactgccccagttaccggcagatgatgacgggtgtgattttgttatcacggattttatttcagatgcctcgccggcttttgagaaccagactgacgaaggaaccaagttatggcgtcatgaggaaattgtgtgcttgatctccttttatggcccgaacagccagcggtacggtgcctgttttcgtgatggcgtggcggtcagtcagaacaatgatgaattggaacgtttcggtctttcagtcgacaaactcagccggctgacttctttaccggaacttatcaataaccagagggggcgtcgttatgacatgacgatcaccttgcggcgaaaagtggtgcgtgaatacggtgttaaatcactggtggaagcgcctgtcaaattcttaggagattaaattatgcagggtttacctgtttcaaacattatcaatgtcacgttgaatatggctcctcatgcggctcaatcccggaactttggggcgttactgatcatcggtgcaagtaacgtga

SEQ ID NO: 5506 - DNA, 797 bp, Photorhabdus luminescens
  misc_feature (23)..(23): n is a, c, g, or t
  misc_feature (708)..(708): n is a, c, g, or t
  misc_feature (753)..(753): n is a, c, g, or t
aagcttccgccaacttcggatantgtaatttattaaaagctgaaccattacaagtgaaataaccgaatggtggatgaggtaacggccacggaataggagaaccgacaggaatttcattggctgttttcatccggttgtctatctcttcgcgggtatattcacgtaatgaatttattacttcctgaacaagcttttgtgtaaccgccaatgtatcgctattaccaaccacatttgtaagctggacaacacctttttgtgttaatgaagcactgggaatatctgttgtcattttttgctctagcgctttatttaattgagcggtgagtttggctatgtttccatcatccagaacatcattgccagatcgtgtcgcgataaaatcagtcacggcagatgataccgctgacgcttgacgtaataccttatttaataagtgggtgggaacattatctggtgaaaatccagtttgtaaactctgatttacctcgtatttgtcttgactgattacattcgcattatcactagtagaaaaagccttaaaatcattcttataactcatatactttctcctgcaattaaataatattattttacaaccaatatattgaattattgtaaaaacaatctctcttgcaattcacgccaatcaagtctagttcagaaaaagaataatgcagcgttcttattacttataaggttaattatttntatataattggtagtaataaatagttcaacattagaaacgacagnccggaatttatctattaatacccattacgtatcactattgacaa

SEQ ID NO: 5507 - DNA, 715 bp, Photorhabdus luminescens
caagcagaagtgtacctaagcaaatcgagcattgggctaagattggccgcattgcggaggataaccctgatttgccgtactcttttatccttgattctttactggcaaaaagcgaagtcaatagcggtaaggtgtcgcgttatgtcagaaggacaaaaagatccaaagattgatgtttatgaaacaagacgtttttctaaggcattatccaggttatctgaggatcttcttaggatagtagaagatgagattgatagaataattgataaccctgaaattggtgagcagaagaaaggtgatttaagtttccttcgagttcataactttcagttaaataaccagttaacattgcttggttattgttgggttgaagggaaaatagagttatacctgctgaactttggctctcatgaaaatttttatcaggaacaaaagcgacacagaaaagcggatttaaaactcattggataggggttctattcattaaagaatgtttcaaggctgcgtattgcgtagccttttttataccactcattcaacgaatttctattcacttaaatcaaaggcgacaaatggcctatgtcattcttaagcaaagtcattgttgtgtcataacattattatcttgcagatattctggcatctgacatttttatcctgttgcaatatgtaactggtgtaagtacattgattcatgccagagaagccgtctgct

SEQ ID NO: 5508 - DNA, 783 bp, Photorhabdus luminescens
  misc_feature (663)..(663): n is a, c, g, or t
  misc_feature (753)..(753): n is a, c, g, or t
tcttattaatctggattggagcacgctgcgctcttagcagcatatcaccaaagtgagttttaacttcattggcagaaagttcatacatatttgtagtctcacaaatatcgttcgattcgcttagtttgattgaatcgaacgacaatcaccacgatcattacctaaaaacactgcatgtcattcaaccaatttctccaaacacccctaaaaatggatggtaacgccatgcttctccgtcatctttcttcctaagacgaatctcaccaaaatgttggcttacattttttaactccatttcatttgtatcagccaaattctggtaaatcgtctcagtatcaagttcaatccaagcactcacaccaagtgcaaactctaattctggcacatagtcaaacgtgtcgctttcttttatccctgcctgaccgctgtccagagccacaaacttcgcttcttcaccctcttctccaagccacaaataatgtagttcatcaggttctgattgacgaaatggtttatggcgttgtaattctgcacaccatgaagcctgttctcgccaccaaagagctgagcagtaaccgtgtttattatcagagccaccttgaagttcttcccataaacgttgatgttcaagatcgaccaaaatttcaaaaggtgaactatctncagcattatcgcgttcctttattttcggccatgcactgattaggttatattgataaggttccaggaacttctgtaaatcatgattagcanaagatattcttcgactccaccctgggcgaa

SEQ ID NO: 5509 - DNA, 714 bp, Photorhabdus luminescens
tcggcagccagtgctcaaatgaaataaattcttcgacacgcgcgttttcaggtagatctttactcagtgtttctaccgatctgccaccggtggttgccaatatacgtaccggtaatgtagccagtgcacgcaatgtggggaaaatcaactgatttaaatcggcattggaaatagtaccctgagtaactataaccaatggacgtggatcatcttcttcccataattgaggtgatgttgttgtcggtacagggttgggaagtggtccaataaaatggactgtatcaggcaatccttctcgtggatattcaaatgccagagttgagagttgcaaaaagcgatcagcaccaaagatgacttcatcgttgaaaagtctggttaatgcggagcctcctgactggactaatgaattattgaagctatcctgcacttcggctatgagttgttggtcggctttatcgacgagctgttcatgtgttaattcaggtggtaataccgcaggtgggatacgtggtccccagaaaatggaatctttcgaagagtaagccagaggtgttatgccaatgactatgactggaagacgatggtgtttttcttcttgcaacagaggtaatatgccataaaagcaattttcggctattagtaattccgcttgttgttcacgaatatttggcgcagttgatggtcgagatatgggattggggcggagaagaaatc

SEQ ID NO: 5510 - DNA, 788 bp, Photorhabdus luminescens
  misc_feature (671)..(671): n is a, c, g, or t
aagcttcctttttcgccccaatgttcgcacattgggattgataaatagcttgtttccctctttcaataaattaaattttgcattttcaaatatagcggaatttttctgctctaccttgacatcattccccaacgatttcagattaatgcctgaaatccgcggcactcttctgacacgctcacctgaactgttcgacgttggtatcaccctatcgtcagattgtcctttggcaaactttgaagtcgttaaaacgccggtattttccacgcgaatactggcatttatctgtagacgatcaaccgcttgtttagcatcatccaacgcttgtagctcttcttcggtcaatcctttgtagaattttttttcagcttccggtattaattcgggatcaatatagctaccggtttcccccgcgcctgtcgattcatagccattaccagacaaaccactaccaccggcaccggtacgatcaggttttgaatcgctctgttttgcccctctacatcttcttgtacctgggcaattttattttccagcgcagcaatatcacgtttaccccgatattccgccccctgataggggatatttgcatcattttcccgccttttccgcccggtgttgttgcaataatgcttccttctttcctcaattacgcttttttcctgagccgntgcaatatctctgttttgcactggcatgatgctggtcactttgtgctcacccgaccctcgatcccttcaccgttcctttacctgttgttggtatccgaacagcctgccggcatgctt

SEQ ID NO: 5511 - DNA, 702 bp, Photorhabdus luminescens
  misc_feature (586)..(586): n is a, c, g, or t
tactgtccgcgggaagctggatgttcaaaataaccgctgtattcgtcaggtacagtggttttttgtttgatcaatttgtttgatcaaatagcactgagcgcaggcccttccttcagataggggataagtagttatcggagtgtgtaaacttgacgttaaacactccgaattttttgacattaagtggatgtcccgccgtaaccgaatagcggctggcgtagccagagggcggggagataccctcttgtatgatttaaagggatttttgatgggaaaagcatctaatagaagtgcagtgtacctctttacaggaagatattacgacgataatggcggtaatcgtattactgctgttggggctggtggtgaagtttatgcttatggcggaaatgatgatgttaccgttggttcatttaaagtcgatgtataccatacagatggcgaccttacggtaaagggagtgtcaggttataccggtattcataaaacgggaaatggcgggctgttatttacgggggctgccggtgtagctgctattgatcacacgggtgaaacgggaaatttaaattattcgggtgcggccggntataataaactggtccgtaaagggttgtctggtgatacttgttttagaagggccggtggatacaatcagttatggcatgaaactaaccgggaaattatatttttgtggtgcaggag

SEQ ID NO: 5512 - DNA, 788 bp, Photorhabdus luminescens
  misc_feature (628)..(628): n is a, c, g, or t
  misc_feature (724)..(725): n is a, c, g, or t
aagcttcacgcccattgttgtactacccatctttgctccttaataggtaaggtttatctaaaattgcatgataatatctgacatgttgcaactttgtgcaaccttatgagaatcgcttgttttatttttgtgaaattaatctagttattataattaggtggatatatttattcttgtgactttatttgattgagacacattggtttaacattttgtggctaacataagggtataaccctgaaatggttaaaaagtataatttttaaagcaaataaatgtgattcagtaaacgttttttgtaaaaaatggcgttaattagttgttaaattacctgatgctaatctaggattcactgtaactttctaattggttacaaaaataattatttcaatttagaattatggaccatttttaggtgcaatcaggtgcaacgttcctgaacctgacagggaaaactctgtgtacccgggagaactgcggatttgcaaaacacagataacactatggagaacttgcatgacagtaaatacaccaatgctaatcacctttattgtctacattactggaatgttgttgataggttttttggcttatcgttcaactaaaaattttgatgactatatcttgngaggaaggcgattaggtagcgtggtaacggctttgtctgccggtgcttcggatatgagtggctggttattaatgggccttacctgggtagtctatnntgcggggatttcagaaagctggatagccattggtcttgtttaggtgctacctgactggaattg

SEQ ID NO: 5513 - DNA, 703 bp, Photorhabdus luminescens
  misc_feature (654)..(654): n is a, c, g, or t
tgacgccgggatatttatccaaccagatagcaattctcgccagcagtttgatttccataaacataatcaaactaccggcaatgaaggcaatccacagattattcgtgactaatccggcgacaaatacaaacttcatgccgaccgggctataaaccccggtagcaatggctgtcataccgactaacggcacaaagctgatcgctctggcaagcgccaccagcatggcattagccccttccccctgcgccatcagttgcaaggataccggaccttccgccagcagactgagtgacattgaagccgctaccgccgtcaaaccaccacttaataccagcaaccaaatgttattttgaatgcgctgtatccgcgtggagaataacccaaccagcgtctcattcgcccctttggccggagcagatccctcgccagctttgggaacacgctgtttcatcgcgaagtagaacatcacaatcattgagatcagcagggctatcccgttaggatccaattgcaccggtttgctcagagccccaccaaaacttaatgatcctaccgctttggtcgcgatataccccaccaatgtcgcaatcagtacccatattcctttgccatatccgtattgataggccacaacaatcgcaggaaatagtgcanagcaggctacgataggatcgccaactttactcaggttgcccatgaaatt

SEQ ID NO: 5514 - DNA, 791 bp, Photorhabdus luminescens
aagcttgtttattttcaacctgttgtagcgatggtagtgttagcaagatttcgctggtctcaccctctgatgaccagataacattcatacctgttagttgatgaaaagccagagcggttgatctgccgatagcataataaatcagcttgtcgggccatgacagattaattttatttaactgattgtttgcataataaactgcattttttgacaatagaaataccatatcacgggtatttagagggttaagcttctcagctagctgtggcagctctgaacctgggtgaatattgattaaaggtgcgctgaaagctgtttttcccgcagcctgtaaccttctgactagttcctctccggcaggagcagggcgagtcaccagaatactcatgtggagggatttcctcgataaacttgggttagaatttcccgtgctccccgttccaacaactcttctgccaattcaacccctgcctggcaggcatcttttggtaaagctgttctctcaccgcgaataataacgctaccatcaggtgcgccaactaatgcccgtaaccagattttcccgtcctgccagatagcatagctacctattggtacttggcagcctccttccagtcgggtattcatcgcacgttcggcaagaacacaaacttctgtatcatagtggtttaatggtgctaacagagtttgtgtttgttggtcgtctaggcggcattcaattcctaccgggccttgaccaacggcaggtaatgattgttctgccgtaacggcgtacggatacgctcttgcag

SEQ ID NO: 5515 - DNA, 702 bp, Photorhabdus luminescens
acgcgccacactgatagtcacatttttctctttcaatccacgttgcccaatcgcaccggggtcctgaccaccatgtcctgcatcaatagcgacaactacccgctgaccgcccttagaagttgtttgcaaaacagcctgttttgtcgtccgcaatttactgttagtaagtgatagcttacctgtatcggcttgtgaactctctctaaaaacagacttgccagtaggtaccccagaagcccgtagggtaaaaatcacccgatattcactatccaactgctgcactatagagttgactttaactttattatttagttcaaatacaatgcgttttttttgtcgatcaggtgcctggctggaacggattttccttactaaatcctgctccggtaaattcataggtaaaccaacaattttttctgattgatggatatctaccactaaacgctctggcgaatgcaatgggaaaaaactgtaattagggcgaccaccggaaaaaaccatcgtcactttagactcatttatgctgttactgacgtgaatattggataaagtcgccgcggctgcggttgttaccactaaactgctcatcataataaacaaccagcacattatcataaaactgatctgccatttcttatcatttttgcgactaaaggacacatcatggtcgggtgatcccttaaaatatttcaatttatctac

SEQ ID NO: 5516 - DNA, 746 bp, Photorhabdus luminescens
ctgctaacttcggatactgtgatctactaaaagcggaaccattacaagtgaaataaccggaaggtggatgggacaacggccaaggaataggagagccaacgggaatactggaaatacctgaaattttttgctctaaagctttatctaaagccctattgaatcgtacagtaagtttagctatatcaccatcatccaaaacatcctcacctgattgtgtcgcaataaaattagccacaacagatgatattgttgaggattggcgtaataccttatttaatacatgagtagaaacattctcaggtggaaatcccgtctttagattctgactttcttcatacttttcttgactcactatattagcattatcactaatagaaaaggctttaaaatcatttttttggctcatatactcctctttaattcaataatatcattcagtaatcaatatattaaattttcgtacagatagcctctctcaattgacgctaatgatagtctagttcagagaaataataatgaaatttattttataacttatagggttaattatttttgcataattgacactaataaatcacccaacacactgcaataaaacacatccagattatttgcatttatcatcttttactttatctttactatttataactaaaaatcttcatgaaaatatttgctacctgtattaaaacaaatgaaaaaataatagtgacaaaaagttatttcatctgaaaataaaaaggcct

SEQ ID NO: 5517 - DNA, 666 bp, Photorhabdus luminescens
  misc_feature (545)..(545): n is a, c, g, or t
caagcagaagtgtacctaagcaaatcgagcattgggctaagattggccgcattgcggaggataaccctgatttgccgtactcttttatccttgattctttactggcaaaaagcgaagtcaatagcggtaaggtgtcgcgttatgtcagaaggacaaaaagatccaaagattgatgtttatgaaacaagacgtttttctaaggcattatccaggttatctgaggatcttcttaggatagtagaagatgagattgatagaataattgataaccctgaaattggtgagcagaagaaaggtgatttaagtttccttcgagttcataactttcagttaaataaccagttaacattgcttggttattgttgggttgaagggaaaatagagttatacctgctgaactttggctctcatgaaaatttttatcaggaacaaaagcgacacagaaaagcggatttaaaactcattggataggggttctattcattaaagaatgtttcaaggctgcgtattgcgtagccttttttataccactcattcaacgaatntctattcacttaaatcaaaggcgacaaatggcctatgtcattcttaaccaaagtcattgttgtgtcataacattatcatcttgcagatattctggcatctgacattcttatcctgttgcat

SEQ ID NO: 5518 - DNA, 771 bp, Photorhabdus luminescens
  misc_feature (749)..(749): n is a, c, g, or t
aagcttcagcaataatcttctcaggaatactttccggtttaagttgattcatttgcccaggactaatggcaaaagtccgctcaccattttccgttactaacgtaaaacagcgaccaattgccccattcactccctgtaaatagttcagatcagtacggctagacgtgttacataagtagcggtaagcataactgccaatctgaatattactacacatagtgcccagtaagacggaacgatcatcggcaagaactgagtaattatgtaaagtattaccaatagtgccaccagcaaattcgtggctaataagattattatcagtaagttctttatacagggtttcagctacatcatcttcaataactaatgaatgcccctggctgaggttatagcgctggataaaatcttcatctactttcgcctcaatatccactaatgtctgatcgataccaacgatataagctcggttattctcaccatccatcatctctttaattggctggagtaaaggatcacgcagactgacgggaaaatagtgttttgatttacgtttaccagggaatttcatttttgattgatgctataacgccaaaaggtgcagcatattagcacaataaaaacggacaggcagcaaatgtcactacgacatttactgccaaggaaaacttaagccgcttgctgacgactacgtaccatatgacgaattagaacagacaccacagccaagatcagccccaggaaagcactgnctattaagataagtagacgctt

SEQ ID NO: 5519 - DNA, 674 bp, Photorhabdus luminescens
  misc_feature (8)..(8): n is a, c, g, or t
  misc_feature (33)..(33): n is a, c, g, or t
  misc_feature (68)..(68): n is a, c, g, or t
  misc_feature (93)..(93): n is a, c, g, or t
  misc_feature (109)..(109): n is a, c, g, or t
  misc_feature (130)..(130): n is a, c, g, or t
  misc_feature (140)..(140): n is a, c, g, or t
  misc_feature (152)..(152): n is a, c, g, or t
  misc_feature (188)..(188): n is a, c, g, or t
  misc_feature (243)..(243): n is a, c, g, or t
  misc_feature (276)..(276): n is a, c, g, or t
  misc_feature (506)..(506): n is a, c, g, or t
ctaattcngtgcactcacgggagagtatattcnctgctctcctcccttcttaattctccataattttnactctcttcattattctttgatttntatatgtttttaattnctggcacaccctttgctattnccttattganaacataatagcnggatggaagggggatatatgaagctcattacgacanttataaaaccattcaaattggaggatattcgggaagttctttctggtcttggtgntcaggggttgaccataacagaggtaaaaggatntgggcgtcagagaggacatgcggagctgtatcgtggagctgaatatagtgtcaattttttacctaaaataaagatagatattgctgtaacagatgaattggttgaggaggtcattcatgctattcaccatcagcttttactgcactagttggcgacggtaaaatctttgtcattgaattacaacaggctattcgtattacatcaggagaaactaacgatgcggctctgtnactcactgatagagaagatagatatgagaaggcaattctcagtggctgccagcgctgtggccagctgtgtaccatcattatctcaggctgctgaaggcgttgttgatcaagcggataatgcttttatgatgattggcacagtgcttgctctgtgatgaccattccggg

SEQ ID NO: 5520 - DNA, 756 bp, Photorhabdus luminescens
  misc_feature (691)..(691): n is a, c, g, or t
atcagtcagttggatgcagtggttgggggcgagttgatgtcatgatggatactgatggtgatttctatctgttggaagtgaatacctctccggggatgaccagccacagcttggtgccgatggctgcgcgtcaggctggattaagtttttcacagttggtggtaaagattttggagttggctgattgatatgtctcaagcggccctgaaagtgaggggacgggataatgaaagtagcagttcccgtcctagtaacggctcttacctggcagggcttatcttcttcctgatggtacttgggaccattatttggggaggtttggccgtccttaactggatgaaagatgctaacagattgcctatttcaaaactggtggtaacgggtgagcgtcactacacgaccaacgatgatatccggcgggcaattttgtcattagggcaaccgggaactttcatgacgcaggatgtgaatatcattcagcaacaaattgaacggatgccgtggataaggcaagtcactgtccgtaaacagtggcctgatgaactgagaattcatctggtagaatatgttccttatgtgcgctggaatgacacacagatgctggatgccgaaggtcaggtattcagcattccggctgaatggggagctaaagggtattttccgatgctttatggcccacaaggcagtgaanaagaagtccttgatggttaccgggccatgactaaacttctcgctgccataaactgaaataaaatc

SEQ ID NO: 5521 - DNA, 676 bp, Photorhabdus luminescens
atcattggttgccaaaaagatatttttcgcccggttaatcagagtatcggcgatattaataggaccctcggcgataatgcgtaatatgttatcagcagaaagcgtggttaatacccttattccctcaggggtatagtcatctccagagacaacagacagcagcccccggctggcaagcaaggtcacatcccgaccggagatatcataaccattcacatcaagatgtgattttccatccagcatgacatggttcccggcttttaaattcccctggcctaaatagattgtttctgcgtcaacggctaagttttgttctgccctcattgacgcacgatttgctaaatctcgggcagtgagagaaatgtttttcccggtgattaacgccagatccgtaggtttctttcccgctttaaaatgttctttattaaaatcaaaactaaatccctctttaaagacagccgtcaaatccccaccggcactcagtttaccaatgatattctgctgattgtcttttatcgctttggttgaaaaatttttgcctgtcagggtgagattttgtcccgcgcttaactcaccaacattatttatctcgttcgcggtaatgctgttgtttttacccgcggtaataatcgggtggctttgcttagtcgggtttacgttatcaagttgagtcgct

SEQ ID NO: 5522 - DNA, 764 bp, Photorhabdus luminescens
  misc_feature (623)..(623): n is a, c, g, or t
  misc_feature (650)..(650): n is a, c, g, or t
catccaatgacagaggctctatccactcagtataacgagacaatatctgatggatatgccgggaaacctccctatacagtgccatacgccccggaagaactttaagctgagggcagagtttcagcgccattgcagtagacattgcactacgtactccaaaacgacgggcaggataattagcggtactaataacacctcgcctgtctgcattgccgcccacagcaatgggaatatgacgaagtgacggatcatcacgcatttcaatcgctgcgtagaaacagtccatatcaatatgaataatctttcgcattctgctttagcctatcaacaacaactgtataaacatacataaaaatagactcaagagcaatctagtaacaatatcggctagtaacaccatcagagcgacggttaaaagacacttttagctcaaatttgaaaatatcttgaccaataaaataattaattaataccgttattaacttttccctgcccgattccttgcgttaagtgacctatcctgtaagtgcaacttttctatttaacgacattccaaggatactaataacaatgaaaaaatagcgggaaaccacaaaaaacctcagctacagcgactacacagncaattaatcgcactcttcattatgctntatcaagcataattatgctgagtacgggcctgccaggttatctggctgcacaggacaatagagagcaaaaatcaaaagaaaaaccggaaaatcagagaaagtcttacactttct

SEQ ID NO: 5523 - DNA, 680 bp, Photorhabdus luminescens
  misc_feature (638)..(638): n is a, c, g, or t
cgaatgtcggtaataatgcacaaatcacttataatcagttctctggtccgcaccctgcgggattagctggaactcatattcactttattgaacccgtcagtgcgactaaaacggtatggcacctgggatatcaggatgtgattgcgatcggtaaattattcactaccggtacactttatactgatcgtgtcattgcattggccggtccacaggttgagaaaccccgtctcatacgtacttgcttaggggccgatctgcttgagttaactcagggtcagcttaaacagggtgaaaaccgtattatttcaggttccgtattgtgcggtactcagtcagatgaggttcatcactatcttggtcgtttccacactatggtttccgttatgcgtgaaggtcgcgaaaaagagctattaggttggatcatgccgggcatcgataaattgtctatcacccgcaccaccattggtcatttcctgaaaaataagcgctttgctttttcaaccacaatgaatggtggcgaccgttctatgggtccaattggtaactatgagcgtgttatgcccttggatattatggcaacgcatttgctgccggatctgctggcgggtgatacgcatagtgctcaggcactgggtcgnctggagtagatgaggaagacttagcgctttgtaccttgtccg

SEQ ID NO: 5524 - DNA, 772 bp, Photorhabdus luminescens
tgatatctcacggctaacctccagcatcggtggtgatgtggcggagcattgggcgatgcgacagggccattcctttgactgctggctgatgcaaccagtagataaagcaatgccggtgattacccgcaatatcgaccgcagtatctggcgcgatctcatgctgaagtccgggatgttgacgttaatggacgctgaggcgtgtagtcagtgggctaagaacctcgaagaaggcgatcttccggcaatcagcgaagcgaatatcctgagtacgtttgagcagcttcatcacaacaaacaggaggtctttgaacgtggcatcatcaatgtgttcaggggattaagctgggactacaaaaccaataatccctgctgtttcggcaagaagatcatcatcaacaatctggcgaagcatgaccgatggggctacaacctgaactggggctggccgcgtgatcagccacccgatctggaacggatgcttcacctgctggatggtaaccccttgcccgacactcgggatgactgttgcatgccgcggatggatgttgtccgccatcactctcatcccgcgtgcgtttaagacgacgcgtttatcattgccccattgctagcaaagtctgcgcccctatatgcccacataccccctgtaccttgctgcgcaagatggatgcatcttggtgcccaatctcgtacccgggccgttcccgttgaacatataactggccgtgccatcacctggccccgtcatgtttggcccgcccccccgttcatc

SEQ ID NO: 5525 - DNA, 694 bp, Photorhabdus luminescens
tgaggtagtcatcgatcggtatcatatgttcccctgtcgggcaactgatgtaggcgaagtactcgcagcgatcaaacgtaaaatggccagcggtaaaagtttgatagcccgtttcggtattatctattgtacattttaaattcgtattcattttttcagccctcagttatgctgggaaaaaccatcaaattcaattaattcaggcagatatcagcccatttctggactgagacatcaccgagaattgactgaatcatcagagttgcaggcttatcagcatggaagcgataagccactttttcaggcaggagggcctggtgcccacgtttgaggtagatacatcccattttttgcccatcgggagtgccattcagcttaacagcgccctctttatcttcatcaatgaccgatccatcagtaagtttgacaaaatgcaccttcacattataatccatagcacccacaaattcgtcgtgcgcacaagcaaaccagtgcgatgtcccttccggacgaccgatctctatggtacagtctaaattgactcgaacaactaccacggccgtacggtgcactggtttgccggatttcctacatgtttggaaaaacctcacgttttgggatcttcaacccactgcttgtgatccaactttgggataatcatgcatccgatgcaacgccgatttatattcgcaca

SEQ ID NO: 5526 - DNA, 776 bp, Photorhabdus luminescens
  misc_feature (433)..(433): n is a, c, g, or t
agcttaaagcaggttctccttcactaaacttgaaatcttttgacggtatccacttccctctctatcttgcaacgtaaaatatccagaaggtctatttaatttcattactacagaaggtaataatggaggaaaagttacaattcatttcgcaaaaccgggtctaaaggaagactttaatactttcacaaacaagatatttaataaaaaactcatatacctcaatggtcaaatagcagatcaaaaatactttaacgtcagttatggaaatgaatttatcaatgctcatgaaattgccactgtaacaatatcacttaaaaattaattttactctttgtggtacgatatcgaataaggtaacgcaccatcaagtcgttatttcatcatgatagactatagaaccgacattccgcactgaattcgtaatttgttgttntaattaagaatcaacaagcatatgaattttatacaaacaatttgaaatcagtatattacagatatagctgcggaatgacagctttatacttatatagcatatttagacctgaattaataaaactggaaaagatcgagctattgccttacaaaacagtcatcagaaatactctgctttgttatattcaatcactgcttacatggtccaaatgctcataaaaacaattatatgctcataaaaacacattaatattataaatatttagcgagttacccatattttctttaatatcaaaccaaacacacaccaccctaatatttaaactaaacatgaacgccccata

SEQ ID NO: 5527 - DNA, 681 bp, Photorhabdus luminescens
atttaatcattttttggtgacgattagaaaccacgcctctgataatgagatggggcgtggtttatttttacagaaaaatatcacgaaatcgtttacctgtttccttgagcgaaccccatgctaaatggtatggtgactcgttttctcaaaatataaaaactaactagcaaggggatttacgcaatgcgtatcattctgctgggcgctccgggcgccggtaaagggactcaggcgcaatttatcgtggagaaatatgggatccctcaaatttctactggcgatatgttgcgttctgcggttaaggctggcacagaattgggtttaaaagcaaaagcgctgatggatcatggtaagctggttactgatgaactggttattgctttggccaaagagcgcatcaaacaagatgactgccgcatgggttcttgctggatgggttcccccgtactattcccaagctgatgccatgaaagaagcgggcttaatgttgattatgtcctcgaattccatgttcccgatgaactgattattgcacgtattattgtgcccccgattacatgcgccattcggccgtggttataaacttaatctattccccggtagccgcaaacaaggatgaggttacggtgaatagctacctctcctaagacgatcaccaatatccctccttacctttagtga

SEQ ID NO: 5528 - DNA, 761 bp, Photorhabdus luminescens
ctgttgcttcaacacgaatagggaaaatagcatctgttgtcggttttactgcctcaatttgtggctcagatagtggcattttattagcgaccgccacatcacgcgcaacccctataatacttaggcagtcagcgcgattaggcgtaatactaatttcaatgaccttatcatccagcttcagatattcacgcagatcaacacctaaaggagcatcaattggcaattcaataataccgtcgtgatcctcagaaatacccagttcagaaaaagaacatagcatcccttcagaaggctcacctcgcagttttgccgccttgattttgaaatcacccggtaatacagcacccacggttgctacagcaactttcaaccccaagcggcaatttggtgcaccacaaacgatgtccagcagtcgttcaccgcctacattcacttttgctacccgtagctcatctgcattcggatgctgagcaccattgaacaacttcaccgacaaccacaccatgaaattgaccggcaacggcttgcacgccatcaacttgcagacctatcatggcaatcggatcacataatgtttcactgctaatggcctgattacccatccgcgtaacccagtcgactgaattttatgacatattccccgccttattcaaaccgtgtgaggaacacggtatgatcttgcaagaacccacgccctcacctacgccttacttacattggcacgcgtgcactccatgccgaagcccagcgcataatgttgg

SEQ ID NO: 5529 - DNA, 681 bp, Photorhabdus luminescens
gtggatgtctcctccggctaactcagttttatcgtgaatttcagcaacaccgaaatgttcgtttaacaaacgatttactgtctgccacatggttcacctctctatgtcgtcaattactttatgaacaattatagtcagagaaaacatatgatcaggtaaaaaagatgattaacagggttatatctcaaaacagatataaccctttttgttattgattgggctcgttagagatttgtagggctgcttgatacgttttacgtttggattttgctcttacaagttttatctgactgtaagccagtgccagtgtaaagaagatagcctgaacaataacaatgcatggccccgttgcaccatcaattgtggaaactgatcagagtacccatgacactgcaactgactgatgcaatgatagcgaccattaacattcggtcaaaacttgcgcataccatgaaagccatatcgcctggtgatattaacattgcaataaccaaaatcattcccaccggttgcagggaatcgactatggccatggaccgtatagcaaaccataccgtaatgcaaaagcttaacaggccatcctactacgcgtgctttggccccgatctaatccatcaagcatgattcctttccgcttacaccgatttccggcataccgcattcgctacccttatgtctaca

SEQ ID NO: 5530 - DNA, 754 bp, Photorhabdus luminescens
tggttaatgccgggttggtaccttctcgtggtcaggcgcgtacgatgatcagttccaacgctgttgcaattaatggtgaaaaacaatctgaacctgaatatctgtttactgacagtaaccgtctgtttgatcgttacaccctgctgcgtcgtggtaaaaaacacgattgtttgatctgctggaaataaccaaggttgcatatataccctatagatttcaagatgcatcgcgacagcaagggcgtggatctaataaagaggcaacttgaaggataacgggtatgatggggcaacaataatgttgcccattttcttacataccctattgatttcaagatgcatcgcggcggcaagggagcgaatccccgggagcatagaaaactatgtgaccggggtgggtgagtgcagtcaacaaagaggcaactcgaaagatgacgggtatattcttactgtgactctaatcttataaatagaaaccaaaataaacatatacgcccggattgcgaaaaatattctttgaattcaatctcatgttgtttctggtcacgctggtcacagagctgcggaatacctatgcctgcgatgggggtaaaactatggcccgttgacacgtcccagccgcgaatgacacccatctgctcactgcaaaggtgtgttatgccgactacccatctaccgaaaccgttcccgcccttaagaattaaccggctaatcctgagtcgcacacttaatggtctctccgcccaccgaaccag

SEQ ID NO: 5531 - DNA, 685 bp, Photorhabdus luminescens
tagcctaagttactttacccccaatgcgccactcagcggggcatccctatttgatgcttatatcttctatttcaacagcttattactatgggattttggcgtatccagcattaatggtgaacttatcagcgaacaactacgggaagtgttccctgccaccatggagctctgtattctggctttctctaccgccttactcgtcggcatccccctcgggattattgcgggagtatggcgtaacaaacccgcggatactgttatcatctccattgctttggtcggattttccatcccgattttttggctagcattattactcacgctatttttctctctttatctcggctggctacctgtctccgggcgctctaatctgctatatcagattgaacctgtaacaggtttctcatttattgatgcctggctatcaaaatcaccctatcgcaatgagatgatcattagtgccatacaacacttgctgctgcccgtattacactcgccgttgcaccgacacccgaatttattcggttgatgagaaacaggacataagaagtttttcggtgataactatataaaagccgccgcaacccgcggtttattcacgctgacaattatcccgcgtcatgtgttacacattgcattgccccctatcatttcgaaactaggattacaattctccacatgg

SEQ ID NO: 5532 - DNA, 765 bp, Photorhabdus luminescens
  misc_feature (589)..(589): n is a, c, g, or t
  misc_feature (701)..(701): n is a, c, g, or t
  misc_feature (765)..(765): n is a, c, g, or t
ttgctaaagagcacagttatacaaaattctcaatggttcgctttggcaacgtccttggctcatccggttccgttgtccccctattcgaaaaacagataaaaagtggtggaccgataaccctcactcacaaagacattacccgttacttcatgacaatcccagaagcggctcaattagtcatccaggcaggagcactgggcaataatggcgacgtctttgttctggatatgggagaatcagtaaaaatttatgatctcgcccggaaaatgatccatctttccggcctgacagtgaaagatgaaaccaatcctcatggtgatatcgaaatcaaaattaccggattaagacccggtgaaaaactttatgaagaactcttaattggtgataacgtctctggcactaatcacccaagaatcatgacagccaatgaagtttttctgacctgggataaattaaacccattattaaatgacttaaaaacatcttgtgaaaattacgattttgaaaatattaggcagatcctgattaatgctcctattgattttcatcctaaagattatatttacgatcttttaaaataatacttacnaatacactcatgtcatgaaactggctgaaaatcatattaccgacattagccttctagacaaataataatcctatgaaatttttaacacacgagaaattaacaatcaaataanttcgaaaattaaaataacaagctaacaaaaacctcattattagatataccctatggatttcagn

SEQ ID NO: 5533 - DNA, 686 bp, Photorhabdus luminescens
atcgtgattggccggttgaacatttttaccaattagcgcaacacatttgtggccgttatccccagtcgcatattatgttactaggcagtgctgacggtaaaattgctgcacagtcactggcaaaaagattaggggctgaaaagtgcacttcattggttggtagactaacaatgcggcagaatgcagcaataatgagtcaacttgatttgtatgttggtgttgataccgggccgacacatttagctggcgcattaggtatcccgatggttgctatgtatcatagtttccacccaggccgttttttggcacctcaacagcattcgcatttggtagttattgaacacccggttcactatatgcaagccacccgcaaagactcgatgtctgcaatatctgttgaacaagtctggcaggcaacgcaaaagttactagaaactcagttgtcaggaagaaaagatgaaaataggtttggttgatgtcacggtaactatgtcttacggtggtattcagacggcagtctgggaactggcgaaagcgttgactgatgccggtcatgagatccatatttttggtggaaagggtgatattcaaccagaactcaatgggagagcaatccaggttcacacttttccattcattcccagagagaaagtcattaatattggtcgacgttttcaacgtattat

SEQ ID NO: 5534 - DNA, 736 bp, Photorhabdus luminescens
  misc_feature (551)..(551): n is a, c, g, or t
taatcatggataatcttccacgcgagcacatcacgaacgaattttggttgctagcagccacctttgcgttacgagctatcatcagtgctattcgggaacgaatcggttttatttgtggcaaaatcgtgcgtcagaaaattcgcgctatggtattggataagctggaacaacttggcccaatgtgggttaaaggcaaaccagccggtagctgggcaaccattattcttgagcagatagaagatatgcaggattattactctcgctatctgccacagatgtctcttgccgtcataatcccgattcttattctgatcaccctattccctgttaactgggctgccgggctaattttattcgctactgctcctctgatcccgctatttatggcactggttggtttaggtgccgcagacgctaatcggcgtaattttgtcgcactagggcggttaagcggtaattttcttgataggctacgtgggttagaaacgttgcgcctgttttatcgcggcaaagcagaaacaccacatatcagcgaatccaccgaaaacttncgttacaggacgatggaagtgctgagattagcgttcctttcttctggcgggctggagttctttgctgccttcctatgcccgtgtcgctgtctatttccgtttctcctatccgggggagcttactttcggcactcaccggatcggcggtactctgcttgccggttttctcgtgccacccctcccct

SEQ ID NO: 5535 - DNA, 655 bp, Photorhabdus luminescens
  misc_feature (110)..(110): n is a, c, g, or t
  misc_feature (294)..(294): n is a, c, g, or t
gcatgtcactgaatgcgggcagatcgaagaagaagtgctctgtttcacgcatttctggcgtcgcgccggagacagcagaacgtgggttgattagttcagttgggctgtangttgaaccgcaaacttcacagttatcgccatactgatcttctgccttacatttcgggcagctacctttaacaaagcgatccggcagaaacatatttttctcaggatcatataactgagaaatagtacgattcttaatatgaccgttttttttcagttcgagatagattttggttgataacgttnggttctcttcgctatgcgtagagtgatagttatcatagctcactgaaaagccagtaaaatcctgatgatgctcttggttcaccgttgcgatcatctcttcaggagccatacccatttgctgagcgtttagcatgatcggggtttcatgagcgttattggcaccgataaagtgaacctctttgccgcgcattcgctgaaaacggacccaaatttctgcttggatatgttcccgcatgtgacccgagaaggattgcacccttagcatatggcaacgcgcacctcaccataattgttttgggaccttgaacatagtcaggatctgacttccattaagtgaaaacgggagtttgatgttaaccca

SEQ ID NO: 5536 - DNA, 816 bp, Photorhabdus luminescens
  misc_feature (663)..(663): n is a, c, g, or t
  misc_feature (731)..(731): n is a, c, g, or t
  misc_feature (736)..(736): n is a, c, g, or t
  misc_feature (749)..(749): n is a, c, g, or t
  misc_feature (789)..(789): n is a, c, g, or t
  misc_feature (805)..(805): n is a, c, g, or t
  misc_feature (809)..(809): n is a, c, g, or t
  misc_feature (816)..(816): n is a, c, g, or t
cctttcggcacggtcccggggcttctctagagtcgacctgcaggcatgcaagcttacggaaatcaaaatgtacaacctgattggagaactcagcggtcggatctttctccagattgacaattattgccaaatgacgaatttcacacgggctatagagtgctttcggtgtcggtgatggcaggcggataggaaaatgagtagaaatatcattaatcaattcatgcagcttcagctcatcacattgagtttcgccatgatgaatatggatacacgatttttctgttaacaagccgttaaagtaggtccacgacaccagtttattgagataacgattatattccagaggttgatgaccaatgatcgatccaatagccggagcctgattgtagagataccaaccgctacggtttgcacgcccttgaggaacataaataaatgttaaatttttctctgatagatctggcgaaatttgcggattaaccagcgttactttccctggcaatgcttcaaatgcagcataaagtttacgcgtcagcacaccaatatcctgtggactggcactgacactcagattattacggcgggcaaaacggataagattacgatagctctgcatcatggtatcgagcagttcattatgcgcatcacgaacctgttcaattntccataagttgcggttatccccaaatttcaaccgctctggatcccacttccactcatagatcagttgngtcanaacctggcgtcgncagccaatgcagcctttatcatcttgatttagagagagtntttcacaaacttttanatanaaacatn

SEQ ID NO: 5537 - DNA, 678 bp, Photorhabdus luminescens
  misc_feature (608)..(608): n is a, c, g, or t
tctttggcttgtttgatggcacgacagatgataaatggggctggttagatccagtcaatccttaatagaactatacccaatggatttcaagagggatcgcgacggcaagggagcgaatccccgggagcatagagaactatgtgaccggggtgagtgagtgcagccaacaaagaggcaacttgaaagatgacgggtatataaataatttaacgggcggttcgttccccgcctgttttgataacacgggagtgaagataatgcctaagtaccgttctgccactacgactcatggccgcaatatggcaggagctcgcgctttatggcgcgcgacagggatgaccgatgcagatttcggtaaaccgattattgcagtagttaactcatttactcagtttgttccagggcatgttcatttgcgggacttaggtaaactggttgcggaacagattgaagcatcaggcggtgttgcaaaagagttcaatacgatagcggtggatgacggtatcgcaatggggcatggtggtatgctctattctctgccgtcacgtgaattgatcgctgattctgttgaatatatggtgaatgcacattgtgcggacgctatgggngtgatttccaattgtgacaaattaccccaggaatgctgatggcagcactacgtctgaacattccggcgat

SEQ ID NO: 5538 - DNA, 771 bp, Photorhabdus luminescens
  misc_feature (553)..(553): n is a, c, g, or t
cctgaccaatggagggcctcgggctgtcattaccgatttggggattctggagcccgatccggtgaccaaagagctggttatgacttaccttcaccccggtgtcacgacagagcaggttctggagaatactggttggtcgttgcggatagcctcagtattaaacacgacgcaaccgcccacagaacaggaactgaaagtattacgggatctcaatgagcgtacagagcgtgcgcatacagaagtggcatcatgatgaattttatttaccaagctttgcccggcagagttatcttcggtgccggtaaaatcgctgaaacaaaagcggaggcgcaattgctggggatcactcgggctctggtgatctcaacgccacagcagcttaatctggcaactgatgtgcagtcgatattaggcgatattgctgctggtatttatgataaagccgtcatgcatgtcccagcagaaacagtagcggatgtcatgcgcgttgtggacgagttgcgcgttgacggttgcgtggcaattggtggcggctcgacagtcggattggcanaggcgatagccctgcaaaccgcactaccgattctgacgatccctacgacttatgctggctcagacatgacgccggtctggggtataacccgggacgggattaaaaccaccgggcgcgatgtgaatgtattgcccaagaccgtgatttatgatcctcaattgaccctcaggctgccagcttttatctgcggtcccagcggcatgaatgcgattgcccat

SEQ ID NO: 5539 - DNA, 689 bp, Photorhabdus luminescens
  misc_feature (687)..(687): n is a, c, g, or t
atccggtagtggaaaaaattctggcggccactgagcagaaactccaagaattgatgggtaaccctatttcattacgtggattacaacctcaggacttcaccaccgagcaatttggtgttccaaccgttaccgatattttgaaagagctggaaaaacctggccgagatccacgcccagagtttaaaaccgcgactttcgcggaaggtgtagaaaccatgaatgatctgcatccgggaatggtgctggaaggtgcggtcactaacgtgactaactttggcgcatttgtcgatatcggcgttcatcaagatggtttagttcatatctcttcgctgtccaatcgctttgtagaagatcctcacaccgtagtaaaagcgggtgatatcgttaaagtaaaagtgttggaagttgatctgaaccgcaagcgcattgctctgaccatgcgtcttgatgagcaaccgggagaaacccactcacgccgcagtaacaataacaatccacaaactgaccgccgccctgaacaaaataacaggaaccggaatacttccggttcttctacctcagccggaaacagtgcgatgagtgatgcactagctgctgcatttggaaaaaaacgttaagattcctatcactgtaaacagatgcactgcttcggcagtgcacgtctcatagttcctgccagaaagaatnca

SEQ ID NO: 5540 - DNA, 748 bp, Photorhabdus luminescens
  misc_feature (646)..(646): n is a, c, g, or t
ctttaacttctttgaattggctttctgcctctttatcgccctgattacgatcaggatgatatttcatcgccagccgcttataggcttttttaatctctttttcgctcgctgttttggaaacccccaaaacctcgtaataatctcttttcgccatctcttattttacccttaacatgcgcgcacgggcgcagagttccctcaacgcccgtgccggttaatcagcaacagttatcatcatctaactgtcaccgcgcccgctaagggctattattttttatctttaacttcttcgaattcagcgtctacaacatcgtcatctttcttcgcactgtcaccagcatctgcggttgcaccagcctgagcctgctgctgagcaatttccaacagcttagcggaagcctgaaccaaagcctgaattttcgcttcgatatccgctttatcttcgcctttagcaactttttccaactcagctacagcgctttcaatcgcggttttatcttctgctggcagcttgtcacccgcttcttccacttgcttacgcgtgccgtgaaccagttgatctgcctggttacgaacttgtacccactcttcaaacttacgatcagattccgcgttcgcttctgcatcacgaaccatccgttgaatntcttcctcattcagaccggaagaagccttgatagtgatctgctgttcgcggccactatttttgtctttagcggcacatgcagaataccgcagcatcgatgtc

SEQ ID NO: 5541 - DNA, 674 bp, Photorhabdus luminescens
tggctgaacgggctgatctggagttgctatcccattacttaccggcagattttgctaagttgcgagctttcttgatggaaagagcacccaagtcattatgaaagtgggcgccgcacagatcatgcggcgtttattaattggtagtaaggtcttaatgttgttcagggcgcttaaataccagctcatttcctttggataacgattcatcaaaggcgtagccatccaaattaaactccaccagacggtcaatttgcgttaactgattctgaataataaactggctcattagcccacgggcttttttcgcgtagaagctaataatcttatatttaccgtttttctcatcgagaaataccggtttaataattttaccggctaactttttcgtattcacggatttgaaatattcatcggaagccaaattaaccaacacattatcaccttgttgttccagcgcctcattgagtttttctgtgatcaggtctccccaaaaagcgtagagatctttaccgcgtttattttccagtttgatccccatttccaaccggttaggttgcatcagatctaacggacggagtacaccataaaggccagataagatacgcagatgattctgagcaaaatcaaatccttattggagaaagattcagcctgcataccggtataaacatcac

SEQ ID NO: 5542 - DNA, 774 bp, Photorhabdus luminescens
  misc_feature (553)..(553): n is a, c, g, or t
  misc_feature (675)..(675): n is a, c, g, or t
aagctttggcaaaatagttagcggaaaatcactaacgtcattaagtaactgctgagcttgtaaaaagatagggatgtcatgacaatagggaatattattacccatctctccttttttatatgcatgcagaatttctaaataacgatacatcttggcttgctcaaaacgcacaccatttgcatcaaaaaatttgatcacaacatcaatttgaggaaacttatcttgaaagtattcagaattccattgccttatcgctggccagtcttgcaataaacctcggtaaacaattgcgtatccccgagcaagtgtgtgatgaaattcaagctgattaaacttagtaagttctactacacggctcataattctacactcctagctaataattgctgctagccgataccctttgaaattcactttcgcagttattactatttctcgattttaaactggcgagagcctgttctataatcctcaatccttttacaagtgtgtcttcatcaatagtcaaggcaggcatcaatttcaacacttcatcattggggccacacaactncacaatcaaaccattttcaaagcactgcttcaccaaatattgtgttaatgaggaatcaaccatttctataccttgcatgaatccaatccccttaactcgcagtacaaattcatggtactctntagccaaagagtccaagcacgctcgaattaattcagccttatgctcaattatcttctgaaaagagctatcgccccatattcattaacatcgcttttgag

SEQ ID NO: 5543 - DNA, 685 bp, Photorhabdus luminescens
agatttatgcctctggtgatttaattgatgagcagagttcactcaatgacggcgctaaacaagcattcattaatcagcgtctgcgccagctcagccaattgcaagcggatgaaaatattgagatccatgcaggaaagattgtcgatctgagaagcatttccttgacggcggggaaagatatcacgctgaccagtggcggcacgcttgatgtgagtaaaatcacagcagaggacccctatgaatatgaagatgaacacggaacgggttatgaaaagcattatgaatatgaaaatgctgatgacgaggaagacgaacaatcttacccacaatttcaattacccatagcgagcagtatcatcactgccggcaataatttaacccttaatgctggtggggacattattgatactgaggcaactttgtcggcaaaaggggtgactgtcattgtcaaaaacacgcagagttacattcaccgtcagggagggataactcagttgaagggaaatatacgccagtcacttctgcgctgattgcatgtgcgttaagccatgctcctaacctgaccctaaaccccttaaaaagtagaacgagaagttccatggcatcaaactgccggataagcatactcggatcaccttgaaaaacaattaccctattatcgatattgctgcacctaacgccgggg

SEQ ID NO: 5544 - DNA, 763 bp, Photorhabdus luminescens
tattacgccctaaatccattgcggtaattggtgcctcagaaaaaccagaacgagcgggttcagttatgatgcgtaacttgcttgcaggaggctttgccggaccaatactaccgattacacccaatagccgttctgttcaaggggttttagcttacccttcaatagataaattaccgattacaccagacttggctgttatttgtactcatcaccgccgtaatttgcaatgtttagaacaactggggcagttgggttgcaaaacggtgattatcctttcttcaccaacgtcccaattcgctgaactaaagcagtgctgccagcactatagtatccgactacttgggccaaacagtttaggtgtattagccccctggcaagggctgaatgccagcttttctccggttccaatactcaaagggaaattggcctttatttctcaatcggcggcagtctcaaatacgattcttgattgggcaaaacaccggggagtcggattttcctactttatagcattaggtgacagtgtagatatcgatatcgatcatctgcttgattttctggctcgtgacagtaaaaccagcgctatcctgctctatttagagcatattcatgatgcccgtcgctttctttcagcatctagaagtgcttcccgcaaataaacctatttggtggttaaaagcggccgtactaagcgagcacagaaattacttggtgaacaacaaaatttggatgcggcttatgatgcagcacttcagcgagcagg

SEQ ID NO: 5545 - DNA, 683 bp, Photorhabdus luminescens
tgtgacatacagtaataaagctaagcatcagatgctcggtgtgtcagaggccgttttacagcaatatggggctgtcagtgaacaggttgtgagagaaatggcgacaggagcactgaaagccgcacaggcagatctggcggtttcggttagtggcattgccgggcctgatggtggcagcgaagaaaaacctgttggcacagtgtggtttgggtttgcctatctaacggtaaatggggtagaagttgtgtcccgccgttgttgttttaacggtgatcgaaatgaagtacgccttcaagctgtcatttattctctgaaaacactgttatcagagattatataccttattggatttcaagatgcttcaaagaggcaacttgaaagataacgggtataaaaaattaacttgatgctgtatgattatacagtataattgtaggcaacatttcagtattaaaaattattcatcgcgagtgagagagccctttcattgcttacgagggagtaaaaatggctattgatgaacataaacaaaaagcactagcagcggcactcggccaaattgaaaaacagtttcggtaaaggttccatcatgcgtttgggcgaagaccgttcaatggacgttgaaactatctccacgggttcattatcactggatattgcattaggtgctggtggtctgccga

SEQ ID NO: 5546 - DNA, 775 bp, Photorhabdus luminescens
  misc_feature (496)..(496): n is a, c, g, or t
aagcttcggataaggtgattttttgcgcagacgggttaaacttctctgttggctatgacaatagaaaccattttttaccgaggttagtcgataagggaaatgtgactcagagtttaaattctcttttggttcatcatatattggtagtggcggataaccatgccgccacaatttttcagaatagatttcaaccactcctgtttcggtatcaaaacctttaactgtgttcttaacaggatcgattcctgcgtatttcctatcatgctgaattaatggcattgaaatccctgctggcttttctcttaacgcctctacggttaagccaataggctcaagaatataattccatcccgcttcaacgcttccattaaaaaatagatcattcatgcctaagcgacaggccaagtcgaagacaatttcgttatctgaccggctttctccccgaggcgaaatcattttttgccttaactgaacgagttcttctgccttagctganatctcaaatcctacacgtagcccttctctctcccaaggcgtattcacgggtagtaagatgtcagcataatgtgcagtaggcgtttgatagagatcacactgaacatgaaattcaagctgttttagcgcatctatcccaattttggtgtccccatgagatgaccacctattcgtaccacatgcctcatacctctatccggcaaggccgtatgtgcaacattgcttgatacagatcatgtgatgttatccaaccctctataggtggccccaaccgtcttta

SEQ ID NO: 5547 - DNA, 674 bp, Photorhabdus luminescens
aatattgtatgcaatacaaagaatcagattttgactttgtgacacgtcaactggaacacgcggggattttctatttctttcgccatgaagaaaggcgtcatgtactggtattggcagatcacccttcggcgtttattaacgcaccgttagcggtattgccatatcaatcgaagatgggtgatcagcaaggctatgggctacgcgcctggcatattcatcgcacaatgattccaggtacggcggaaatgaatggttataacgttaaaagtgctgcggcaatcagtgccagcgccaaagcgaacagcggctattctaccaatcccaagctttctatctatgacgaccgacgtcaggaggaacgtaaccaactggaaacacaggcaacgctgtgcatggaacaatgggaatcacagtcctattacgcacgcgccgttaacagttatcccagtttacaagtggggcatcagtttaccctggaaggcacaccagcgccgatggccgttatgccgtctgccaccagctactaaaagcggagaacaacctggatgaacgtgaattactgtttccgcctaacgtgaccttatacccgcgaatacgtatcccgcccggtacttggttacctgacctacttttcggcgattgccccgttggggtaggccactccccaaacacca

SEQ ID NO: 5548 - DNA, 760 bp, Photorhabdus luminescens
  misc_feature (303)..(303): n is a, c, g, or t
  misc_feature (360)..(360): n is a, c, g, or t
  misc_feature (366)..(366): n is a, c, g, or t
aagcttcacttaccgcattagttcctcggcggctcaaaataccgagtttaaccttactgcattgattgctgatgtgacgtgccagtaactgaccgataccccccaatccacccgtaatcaggtaaacaccgccatcccgcagaatttgccgacgaggtatctcatcaagctcagtaaatgtctgtaattcacgttcaccctgtttaagcgaaatgctggtaaccggtattccttctgtcgtctcttccggttgcatatccgtatacagttccgcaatcagcgattgatatgtagcaaaagtgncatcatttagatcgatatgacgtgcagaacatcccggatactcggccgccaatattncgagcnaaccaagcgcgggtgcggcattacaggctcctagcactttggctgcctgtagcccgcgggatatcacggtaatattaaaaactctgcgatgaccggcaagtgctttaattgcagccgtcaggtgcccaatgcagtctgtggctgagaaatccccggcgcagtccaacaccagatgatacgttgtggtagcacttgttgctgcgtgcggccatctatgacgcgtcgatatcttagggctggtacttacccaactaacgcgtatggactctgccgcggaatcgctcacgttgtggaagaccgatgctaccgggtgccctcccttgccacacacactttacttaacggattgggcacccaattgaggcacggagaatatccggacccgttcgcctat

SEQ ID NO: 5549 - DNA, 673 bp, Photorhabdus luminescens
  misc_feature (99)..(99): n is a, c, g, or t
  misc_feature (265)..(265): n is a, c, g, or t
ctgccgatgccggcaatctagtgccagccgaccaagttgaagctaaatttttagcccgccgcaaagccacacttcgccgttttgaggccaagtaatgcnattattttggacgccagaagccattcaagaccgtgaggaaatatataccttatggatttcaagatgcatcgcgacggcaagggagcgaatccccgggagcatagcaaactatataaccggggtgagtgagtgcagtcaacaaagaggcaacttgaaagatgacggntataaacaacaatcttttatttaaggggtaaacccttttaatttaattaggaataaaatctatataaaaaaacacatagaaactaatcttcatttctataatcacatttaaacagagaaagaattttattaaaaataaattccaatcatcatacaattcatatttcgattcatcatacaaaattgaactctactggacgccaccttatctttccctcttaaatataagaccttcccctttgccacataagaattcaacactcatattcggactatccaaagctgctatgctcttttaaatacggaatgaatggttaaagtcttttgtctaatcccccatcaacccctaataggagtcatctctccttcccaagatataatacacggtgtctcgctacatatttcttct

SEQ ID NO: 5550 - DNA, 767 bp, Photorhabdus luminescens
  misc_feature (756)..(756): n is a, c, g, or t
tttcttgtcatccatattaaaactccagtttcagatgggttgttgaaacagaatagaataatgaatttattttgaatgaaatgtgacagatattacttgttcatgtaattggtttcataagatgtgaaatgtgatctgtatatcgcttttacgcttattacgacgcttttcattactcgattaaaaaaacggaatctctgataacgagttcggctgagaacatattcatctgtggagttatttcttttttggcactgagttgcaatgccagattagccgcccgctgagccattcgttctattggattatgtacggtagttaagggaggataaagatatcgggccgggacaatatcatcaaacccaacaatcgacagttgttccggtaatttgattttccgttgatgtagggagcgcatcataccagcagccataacatcattgaatgttactgccgcggtaaagccgatgtcgctgtctaagagcttttctgctgccagttctccacccttttcattaaatggaacactgataacccaatcgccaggtactgtaacacccgcattagccattgctgcataatatccctccagacggagccttctattatcaatcggtagatttgccgttacacaagccatttttcgatggccgttttgaagaagatagttggtagcaatctgagaagcgctgacattatctaaccaaatgcaccggctggcgatagcagggaaatatcgattgataatcaccaatnctggtgtatga

SEQ ID NO: 5551 - DNA, 687 bp, Photorhabdus luminescens
ggcgtaccgagaggtgcgctcttatcaatggataccgttatttgatctcgtttttaaaatccactaacaccaccaaaggtatagaaaaacgaaaatatcaaattaagatttcagtccttaacaggcagaatgtgttaaggaaaaaaagcattttcctatattccggtgtttggtttttgataatcactggggtgacctttttattaaaagaattgcccttgagtgacagaggcgtaaaaggcgatggtagtaaactgagtcccttttctgcgggggtaacccgtttgtttgactacttggtaattcaagttggtctgattgccctctctagtaggagtaacccatggatgtgatagccatcgtcaatcaagttttggctgaatatgctgctaaattcggcttgccgcacttagctttaaatcatgaaggtgtggctgctctctgttttgatgagcacctccacctctctttgatcttaattcctgaacgtgaccagctcgttttacagatagatgtcgttgatatcactgcggtcggagaggggattttcccgtcattagccagctataatcgtcattggtatcactttgatcttcactttggctttgatgagtcaacgctgatggtgcagctttatcggcaatgtcatcaagtcggctgaatcacgctgtcaatgaagagagtctt

SEQ ID NO: 5552 - DNA, 753 bp, Photorhabdus luminescens
taggagaagatattctcgataaagttgagactatccgcaaattatccaaatcatcccgcgcaggtaatgaagcacaccgccagcagctattatctacattgcaaaacctatctaataatgaactgttaccagttgcccgtgctttcaatcaatttctcaacctgacaaacgtcgcagaacaatatcacagtatctccccgcatggtgaagctgccagcaaccccgttgcgttagcgaaattattcactcgcttaaaagaaaaaaatttcaataatggcgatctgaaaaaagcggtaaatgaactgtctattgaactggttctcaccgctcacccaactgaaatcgctcgtcgtacattgatccataaactggtagccgttaacacctgtctatcgcaactcgatcacgatgatctagcggattatgagcgtaacaacattatgcgccgtctgcgccagttagttgcccagtcatggcataccgatgatatccgcagaatccgtcctaccccaattgatgaagcgaaatgggggtttgctatggtggaaaacagcttgtgggagggtgtaccaacattcctgcgtgaattgaatgaacaactggaagagtcaatcgattacaggctggcagccgaagcggcacctgcccgctttactgcttggatgggcggcgaccgtcacggatcctcaatgttacccctgaagcacctcacatcggctactgctcagccgctgcacacccccgcctatccca

SEQ ID NO: 5553 - DNA, 676 bp, Photorhabdus luminescens
agcagaaatctgtattaccggccatgaagtggtagccaaataaccaagcgtaagccgccgagtgggctgtcttcagcacgaacccaaccgcggtgttggttaatcgcggtttcaacaatggctaagccaaggccagtgccgccggattcccgatcgcgggcttcgtctgtacggtagaaagggcggaatatgtgttcacggtcttccgggttgacgcccgggccgtcatcatcaacggtaatagtgatcccttgattatcggcgtgaaatgcgaccgcaatatggtggtgggagtagcgtaaggcattacgcacgatattttcaaaagcactgccaagtgctaatgggttgcagtaaattgcccaagaactcggtggtaaggttgcttcaagggttttatccatctgttcagcttcgaagcgagcattgtcaagaatatccgtccataaatctgtcattttaatgttttctctcaacagctcatttttatgctgactgcgggagagtactaacagatcgtcaatcatgctgtctagccgttgggcttctgtctctattctttctagctctttattttcaccatgacggcggcgaactaatgctggtgcaagctgtatgcgggtgataggcgtgcgtaggtaatgggagatatcggaattaaccgtgttgtgcgata

SEQ ID NO: 5554 - DNA, 749 bp, Photorhabdus luminescens
aagcttgttcacgacttaccacatgcacccgaatatcttcatgttcaccagataatccatgaataccggtcgctgtcgtggcatccacttcccccaccatcacagagatacgttccgttgttcctccgggactggagagataactcaacacgggtctgcaacgtttaacttcgattccggcctcttccattgtttcgcggcgcaccacctgttcgacatcttcgccctcttcaatcataccggcaacaatttccagtaaccatggcgtcgctttcgtctctattgccggaatacgtatctgctctatcaatacaacctcatcacgacgtggatcataaggtaacaatgcaccggcatggccccgctcaaaaacttcacggctaacctcttcactccaaccaccggcaaacagacgatgacggaaacggtaatttgtcagtttaaagaatccattgtacaaactttttttcgcgataatttctatatcctgcttatccaacatgactggcgttaacggcttcttatgcataaaattctcctaaatagttccttacttgctagccactaagatgatattaatcaagcagagttaaaaaattcactcgctgatggtgtgaagttaagctcaattaaggcgatatgggacaaacggctacctttcgctgatagcatactctgctagaataataacatacattttttcatcaccccaggcaacgaaagaatctatcccaataaccgtaatgggg

SEQ ID NO: 5555 - DNA, 663 bp, Photorhabdus luminescens
aatcaggagatctcggaaagagagaaagctgagcaggcgcatctgatattgttggataaactcaaagaagagatgaaacaccgtgagcagacgcagattgaattggaacaacaatctgtattgttgaaatcttttctcgatgcttctcctgatttggtctattaccgtaatgaaaataatgagttttctggttgtaatcgggcgatggaattgctgacgggtaaaagccagaaacaacttgtcgggctgacaccaaacgatgtttatgacaaagaggttgctcgcaaggtaatgaaaaccgatgaaaaagtgttccgtcataatgttgcactcacttatgaacaatggctagtttatcccgatggtcggaaagcctgttttgagcttcggaaagtccctttttatgatcgggtaggaaaaagacatgggcttatgggatttgggcgcgatataacggaacgtaagcgttatcaggacgctttggagaatgcaagtagggataagaccacttttatctcaacgattagccatgagctccgtacgcctttaaatggcattgttggtttgagccgtattctgctcgatactgagttgacgtctgagcaaataactatctgaaacgattatgtcagtgcctcacgcttggaatattttcaatgactt

SEQ ID NO: 5556 - DNA, 764 bp, Photorhabdus luminescens
  misc_feature (495)..(495): n is a, c, g, or t
  misc_feature (538)..(538): n is a, c, g, or t
cgcagaagaagacaaaaatgatttcgctgaaaatagcgcttatgttcatgcaacgccggtgatccgtcgcctggcgcgtgaattcggcgttaacctggctaaagtgaaaggtacagggcgtaaaggccgtgttctgcgtgaagatgttcaggcttacgtgaaagacgcggttaaacgtgcagaatcggctcctgcatcagccggtggtggtctgccgggtatgttgccttggccgaaagtggatttcagcaaatttggtgaaattgaagaagttgagctgggtcgtattcagaaaatctctggtgctaacctgagccgtaactgggtggtgatcccacatgttacacagttcgacgaaacggatatcactgaagttgaaaacttccgtaaacagcagaatcaggaagctgagaagaaacagcttggcgtgaagattactccgctagtattcatcataaaagcggtagcaaaagcgctggaagagatgccgcgctntaacagctctatctcggaagatggtcagacactgacgctgaanaaatacatcaacattggtgtggcagctgatacacctaatggtctggtggttccagtgttccgtgatgttaataagacgggcatcattgaattgtcccgcgagctgactgagatgcctaagaaagcgcgtgcaggcaaactgaccgcatctgatatgcaggggagatgcttcactattgtcagtcttgcggggcatcggtggaacaaccattacccccatcgtgtat

SEQ ID NO: 5557 - DNA, 676 bp, Photorhabdus luminescens
  misc_feature (522)..(522): n is a, c, g, or t
  misc_feature (531)..(531): n is a, c, g, or t
tctgcacccacaaattcaatctgttgaatggtgtggcaaacaaattcagctgcatccgacgttaaaacgggggatggggatacggtgatattgttacgcagcgcttcccgctgttgttgggcttgctgcaacaaggctttttgttgttgcgtgatagtttcttgatccgccgagctgacaggaattgccgcctgtgccagtgcggagattgtcagcagaataagcccagtcaggctgcggtgataaaacggtaattttcccatagatgataattaaaaatttgataatgatattattaaactattctaatgtggtattaatttcccgtctgagtgggcagtgtgaaatgtgatcaatgtctggatctttaatcctgacaatgggaaatcggatatattaaatgctgtaaagtggtgataagaatgaaggtaattttttatacatcaataccaattcttcaagttgcttaatggtattgcgtcccaaatccagcaggcgtgcgatatcctgctgactattctncagcgcatntgttgaccggtaagcgagtaacggtgtcagttttcaagcgtgatttgattgtttagcggtgtttttaatagactggttgacaaaagttcgaaaattttacgcgctttaatgatcaaggcacagattcaataaaagtgtttaattt

SEQ ID NO: 5558 - DNA, 757 bp, Photorhabdus luminescens
  misc_feature (621)..(621): n is a, c, g, or t
tccctttcttccaactcaattcttgtgcttctttggataacacccagtcaacaaaccgtttggcgttgtccatgttgcgggcatttttgatgatacttacgccgccgatttcataaccggtgctttcacatggcgcgataagtttcagtggtgcgccattttctacttctaatgagtaatcatgcaggaaaccgataccaatcgcagattcgccacgggcggcatttcgggctggggcaataccggatttggtgtactgagaaatattggtattgagttttttcagataatcaaatgcctgatctttgccccataattgaacaaaggttgccaacgcggtgtaagcggtgcctgaactttgaggatcggcaatctgaatttcgcctttatatatcggtttggtgagatctttccagcaggttggaatcggcagatttttctcttttagacgttcagtgttgacgccataaccaagaataccgacgtaaacggcggagctgtagttgcctttgcgtttagccgggtcgcggaactgcggcatgatttgtgtcagattaggggatttataaggttctagcagatccatctctcccgcttgagattgtgggtccagagtcccgncgtaccagacatctgcttgtggattgcgtttttcggcttcaatttttgccagagtactgcctgaaccattacggacaaaagtggtttttacattatatttttcaccgaatgctctggcttcagtttcacacaaggc

SEQ ID NO: 5559 - DNA, 674 bp, Photorhabdus luminescens
  misc_feature (641)..(641): n is a, c, g, or t
tacccgtaccgcccgcagagggtgtgccggggaccattccgcaacccctgacaaaaaatccaccgcttctcagtacttcccgttggtcgtttttacccagctatgaagactgggttgttcttgggcaggaggtggctggtctgactgaaaatgggttgaattatgtccgcgacagtacccgggagctccttgcccagtttggtacctggttaaatcaagctgggaagtgggtgtgtgaagagattattgatccgataagccatcagatcagttacgcgttttcctgggtcagtgaacaaacgggaaaaatcgtgacctggacggagagtgagataaaagcccggtggcagacggtgcaacagggttcagatatcaccctggaagagttaaaaaacattagctggatgcagatattaaaagaggtgggggaaggcatgctggacatggtggtgattattgccggtgttgccgttgttatcctggtcacccttgccgttgctgctgcgctgattgcactggtggaaattttagcccgcggtgctgcggtaagcgccgctgcgttggctaccgttcttgcaatattggcgagtgtgacattcgccaccgttcataattaccggagagacatatggaaactgtanattatttgcccagttgaaatacaactaaccgcg

SEQ ID NO: 5560 - DNA, 755 bp, Photorhabdus luminescens
  misc_feature (633)..(633): n is a, c, g, or t
  misc_feature (651)..(651): n is a, c, g, or t
aagcttttatggcggtaataaaaacataaaataaagacattaaactggttttataattagctcacagttggaaagaacaacatgataaatgaacagtttactcgttgggattcagcagaatacctgaaaaccaaagtagatatggctgcgtatttgaatgcctgtattgaagaagcgggtgatgatcctgcctttattgtgcgtgcgttaggtacaattgcgcgtgcgcatggtatgactcaggtggcaaaagatgccggtctgtctcgtgagagtttatatcgggcgttatctggtgacggagaccctgagtttggcactattctgaaagtcgttaaagcattaggtttgaaactccatgtgacagaggaataatattgatcatagtaatgaataacctgctatttgcccgcttgttgtggaaaggggaaaactaaaaggagtgaactatactggttacagaacaggttcactcactactttagggatgttgcagttaacgctatatgcaaagccacagactcatagagagagggactgttatttgtattagtgtctagcgatactcccacttatatttaagctcaatgaatttgctatcagaacctaagctggcatcagctttttccattntttcaagccatttctcanaatcataaggccatttctttacatcctcaggtaaagtattggataaaaccgctatttgttctttagggaattttttaactattgctccgttcttatataatact

SEQ ID NO: 5561 - DNA, 666 bp, Photorhabdus luminescens
  misc_feature (556)..(556): n is a, c, g, or t
gcgagtcacacatggaaaacaacaagtttttgtcaaatcaaatctgcgcgaaatgctccctgtcttcaaagcagaatcagaacagcttgaactcctggcacgcagccaaactatccgtgttccaactgtttatggtattggcaacactcgtgaccatagctttctattgcttgaatttctgcctttaaaatcttttgaccttcacagtgcctattgcttcggtcaacaactggcaaaacttcatcaatggagtgaacaacctcaattcggctttgattttgacaatatgctggcaacaactccacaacctaatagctggcaacgacgttggcatcaattttatgcggaaaagcgggttggttggcaattacaaatcgcggcagaaaaaaacatgatatttggtgatattgacaatatcgttcaagctataagtaacaaacttcaacaccatcagccacaaccctctctgttacatggcgatctctggcctgctaattgtgcttcgctggatgaccaagccgttgccttcgacccagcctgttattggggggatcgngaatgtgatttcgttatgttcccgttataccctgatttaccatgcaaatttttgatggctatcagagtatatggccacttcctaccaactttattgaacggcaacctgta

SEQ ID NO: 5562 - DNA, 760 bp, Photorhabdus luminescens
  misc_feature (520)..(520): n is a, c, g, or t
agcttgcgtgatggaagaactatttttctgaatggagaaaagatcactaatcacgtggatcaccctgcttttcggaatgcaattagaaccgtagcttcactttatgattatcaggcagcacatgctgatcagatgacgttcgaaacatctggtggtaagcgcgttggtttatattgggaacttcctactacccgagagaaattaattgccagaggtgaggcggcgtatgcctgggcaatgcagagttgtggttggttaggtagaagcccagatcatgtttctgctgctctgaccggaatgatgacttacctggaagtctttgaggaatattctaaggatagggctgaggcattaaaaaattactattcatatgcccgtgataaagatatttatttggcttttacattagtcaatccacaaggtgatcgatccaaaacgcccagtgaacatataaaaaacgtctttcatactcttggtgtattggaggagaaaccgcaaggaataattggtcgcggggcanagatgttaggaacagcggctgtccttgcagaggaagtggttgttggcgtgtttaatccactcaaagagggcgttgatgataaatatgctctatcttttgcattaccgttgaatactaaaggaataaaaattctttccagaaaatcctatgaaacaggcagtaataaatttgattcccctctagcgcatcagtttgatgagaatgatgcagtcatttattttgacgatgtttttgttccgt

SEQ ID NO: 5563 - DNA, 678 bp, Photorhabdus luminescens
tccttcccccaacactgatgatatcccaagcgctagtcccgtaacctgagtccttaaacaacacaccagctctctgtgttgtcgcatctacccacatcgaccttcaggatataaatttggttcccataccgttattggaaccgcagtggaattagatgaactttcaattgagatttgacgttcatgttgttctaatttcataactaaaatatctcctataaaaaataaaatcacacttcaatcttatttttatacctaaaatcaagattaattttaattctaaaatgaataaaaaccctcatgcttatcaaaaaaacattaaattcaccaatgaattgttaatatatgaatttacttataatccattaatggcattaatttacccatatgcaaaataatttttcaaaacagtagatcacttggagataattaaatccaatttcaattatctatcagttaaatataaacattgagttaaaatcagaaaaaaataatataaattatctatctattagttgagccagatctttatttataaaaaataatgatgtttgtttaattttaaaaaaagtaaataatagagtcttatgataaggtgatttgtataaattaagaattaggataagtattttagagggaactaaataagaaaaaacgaaaataactaacctaggagta

SEQ ID NO: 5564 - DNA, 767 bp, Photorhabdus luminescens
  misc_feature (579)..(579): n is a, c, g, or t
  misc_feature (587)..(587): n is a, c, g, or t
  misc_feature (743)..(743): n is a, c, g, or t
aagcttattggtattgttacaagccgccagaattgatgtttcttgtgaggcatacatacagttgtaaattttagcgccccaattccgagataagtttcttaatctatttggcgtaataagttcgccaagcactaaaatgatctcgatacctaattcttttgcatcacatgcattgttccggcaatattttaacaactcagcggcgaccgcaggtgtgcaaactaaagcggttattttgaggtcttgtatcagcctgagtactctgtgcatgccaacaacgggcgaacgaggccacattttgataacggtatgccctaaactgcgaaatacatcttcaaatgtatcgccagtggagtgcaattccgttggacccatcacgccaataatgtgttgtttgccttcttgattgaaaatagactcatattgcagagtcagaaaactattattgactaaagagtctatttcattgcgaggacaaggcgttgatggcccagtcgtccctgtggtttcataatatatccaagcgttacttaggctatctgaagatatcgtgtttcccgccttacttagatctgattntgtagtanagggaagtttttcaatcaatgaggataaactttcatcatcatttgggtttattgcatctagacgatcttgatagaaagctgacccatttttcgtataaattataactccttttaattttcgtattgtattctttccaatgtggagatatttatctngccagacagatatttttttagctc

SEQ ID NO: 5565 - DNA, 679 bp, Photorhabdus luminescens
aataagctaaaacaactcgtaataacctgtaagattttatcacaaattgccagaagacaaaaaatagacataattcatactaatggaacttctgacaacaaaatcgctatcctcgcaaaaatacttttcgggatgaaatgcaaaataatctatacaaaacataatcattatcctgtatcttggttatccaaaatcaggctgaaaaaattcaatgaaagaattattttcgtaagtgattccactagaaatcaatgctcctcttttatctctgataaacaagttgttactataaaaaatggtattgatactgataaatggaaaactgaacatccagttatagaaaaaggaaaaataacacttatttcttctgctggaaccgctgaacacaaagggtggcattttttgataagatgcttggcaaaaaataaagagctatctgataaatttcgtataaaaattattggacgcattcctcgccaagaagatataaataaattagtgggtgctcctttctctcacgtcgatattgaatttactggttatattaatgatgataaagaaattattaattatatggaaaatgcttctatagggtttggtttatccactgattgtgaaactatcagttttgcttgcagagaaatgatggctcgcagtttacctgttattgtcagtgatt

SEQ ID NO: 5566 - DNA, 787 bp, Photorhabdus luminescens
aagctttttgaatgaacatccagatctttatttacagagaaactcataattttatctttcataatttcacctatcatgattaaactgtaaaactgtaaaactgtaaaactgtaaaactgtaaaactgtaaaactgtaaaactgtaaaactgtaaaactgtaaaactgtaaaactgtaaaactgtaaaactgtaaaactgtaaaactgtaaaactgtaaaactgtaaaaacttcgatgtaaggttatcacttttacgacgcaatgagtaattatgtttttaatgaagaattacaatatggaatgtgaaaaaattcgctgttcatgtaattggtttaattaagtgtgaaaatctgacgtgtgtattgattttcgctcttgtttataaccgagcagtaaaataattttatagctcgtggtcctattctcttaggttaaataatgtggatgatcgcttttagtgccatttgaaagataacgggtatagacagcattaatctaataacagaagtaaaagcatttaacagggttaacccgattagctgcgaaaaaaggaataaaaaagtttatttaattacattaaaaatgattaaaggaatgaggggtgttttaaaatcattagcatacctgttaccctctttagttttaaatctaaaaatttaagaaggaaaactaagtgtcagtttaatgaaaacggttaaattaaatattattcacgacacgaaaaagaccattgggctttaaaaagcggtaaaaccttgtacgataaaaccagacatttaaatagtgg

SEQ ID NO: 5567 - DNA, 700 bp, Photorhabdus luminescens
taatcgcctttaccgaaacggcggtattaacagaatctctgttatccgcatttgatggcggtatcacgccagatgaattacccggcattctgacacaagcaggatatcaacaagagccttatctgtttccacgcaccggcgaaaacaaagtctgggtagcacgtcaaggctataccgattacggaactgaggcacaattttggcgtcctgtcgcacaacgtaacaccctgttaaccgggaaaacgacgctgcaatgggatacccactactgtgtcatcactcaaacccaagacgcggctggtttgactgtcttagccaattatgactggcgttttctcacacctgtgcaactgactgatattaatgataatgtgcatctcataaccttggatgcattaggacgccctgtcacacaacgtttctggggaatcgaaaatggtgtgaaaacaggttactcctcaccggaaaaaagccggtctctccccaatcgatatcaatactgccattgctctaaccggaccactccctgtcgcgcagtgtctggtctatgcaccggacagttggatgccactattcaagcacgacacctttcacacattaacgcaggaagagcagaccacactgcgtgatttacggattataacggagattggcgtatttgtgcactggctccccggcgtctggtgcaaagtcaactagg

SEQ ID NO: 5568 - DNA, 773 bp, Photorhabdus luminescens
  misc_feature (723)..(723): n is a, c, g, or t
  misc_feature (773)..(773): n is a, c, g, or t
aagcttgttgggtaatttttattttcccaaatctcttgatgaagagttttgacatcaatcactataatcaggttatacaacattgaccatagccctgatatcaaaaagtcgtgaattttttatgtaacaggatttttttctgttttttaattaataaaaaataatgtacgtcatcatgatgatttggatagtctatacccgtcatctttcaagttgcttctttgttaatggcacttgctcaccccggtcacatcgttatcgtgagtgttgtgctcctttggggggtgataaatccttataatttgtgtgattaactgcatcatggctatttaatttctgacagaatcagtaagtaaacagaattaatctcccggttttttaacttttgctaaaggaaacgggttatgagtgatattgctcttacagtgagtatgttggcattagcggctgcatttggattgtggattggaaactgtaaaatatatgaagttggattaggtattggtggtgcttctaacactaccaatgattcgtaaactgaaatagcagtttggcatatcggctggcagtctcattaatgcgtaatgtactcttgcattagccatcagtaaacgcacaaaacacgcctattcgaggcattggatttagaaatctctgattgatagaggctgcttaaggagagtgggcaaacaaggcgtgtttctttctcttctttatgcacanagcattctacaaattcctgaaataattatgtaaagtcctcgttatcattn

SEQ ID NO: 5569 - DNA, 686 bp, Photorhabdus luminescens
ctttttcatctatttttgagttttcacttaatgttatttcacgaatatcagaattaaatttatgggattccggatcacaataccagtttgctttgtaggtacgaacagcatctttgttccattcgctggtaaaaacacactgaccgccaatttcttcaaaaccttttcgaattcctccaatccctgcaaaaagatcaatgaaacggaaaccgtattgaggatgatttttgggtggttcaggtagcattttttggagcatagcaacttcaacttctgttaacaacttctggactgattttccgtgaaaccagcgatttaaagtttcacgggtccagtcgttataatttactctgcgcaaaagttctgcaatagttttttgatcataagactcaaaaagttgtcccatcagctttttatctgatgccaacttttgctgctgcaataacttcgatttttcatggagatcctgggcatacgaaaaaaattcttttattttattatcccaaaatgttttatttagcgatattatatcactcgattgacccagaataaagaaatttatggatattcatacagttatttactttacacagtgacttatctaaccccagcaccgatggcgaatggcaccggcaaaacaccgctggcgccgacgtcggcagaccgcaccgccgattatctggcca

SEQ ID NO: 5570 - DNA, 822 bp, Photorhabdus luminescens
  misc_feature (352)..(352): n is a, c, g, or t
ttatagaatcctactgggaaccgttgtggaaatattcaggaacacattcatttaattacaaaaatacttgatgtaaataacaagtgttctgatatataccctatggatttcaagatgcatcgcgacggcaagggagcgaatccccgggagcagagataacgatgtgaccggggtgagtgagtgcagccaacaaagaggcaacttgaaagataacggatatattcccgccaactgctagcgggaatataacttgaaaaacattaaagaaatgacttttcaggagaccaattagatcttggctgtcgccaaatattttgtcatttcatcatcgggtaccataccaccaccggtngcccagaccaaatgcgtagcctgtttcatcttttctgctgaaaggtccttattgttcacgtaatcaaggcttccactcacacgatcagggcccgtcatgccaactagcgcccgaaggctctaaccggataccttgatgacgatcccggaagccccacaggttctccattgagctgatgctgaacaggctaaaatcgcctccacgcgtacgtttgaccgtccgcccaccagagcgtgtaagccctgcctaccgccaagaaccattagcccgcggggatatccgcgcctaccccatctagctggcccgcaaacctcggatctcgcagccccgggttatgccccgccaacatcatatctcgacacacacgcccgcgtttcccgtccccgatgtctgcgactcatgcatccctccccgcgcctgtctgtcacacgaacagtgtatatccgcccatccacgctaccgtactatta

SEQ ID NO: 5571 - DNA, 680 bp, Photorhabdus luminescens
  misc_feature (350)..(350): n is a, c, g, or t
cacgcccattgttgtactacccatctttgctccttaataggtaaggtttatctaaaattgcatgataatatctgacatgttgcaactttgtgcaaccttatgagaatcgcttgttttatttttgtgaaattaatctagttattataattaggtggatatatttattcttgtgactttatttgattgagacacattggtttaacattttgtggctaacataagggtataaccctgaaatggttaaaaagtataatttttaaagcaaataaatgtgattcagtaaacgttttttgtaaaaaatggcgttaattagttgttaaattacctgatgctaatctaggattcactgnaactttctaattggttacaaaaataattatttcaatttagaattatggacccttcttaggtgcaatcaggtgcaacgttcctgaacccgacatggaaaactctgcgcactcgtgagaactgcgtatttgcaaacccagataccactatggagaactgcctgacagtaatcacaccaatgcctatcacctttattgtctcattactggaacgttgctgacagtttttcggctaatcttcaactaaacatttgagactatatctcggaggaaggtattatgttcctgtaaccgctcgccgtcgggcttgcaattacggtcgttattatggct

SEQ ID NO: 5572 - DNA, 766 bp, Photorhabdus luminescens
cttccgcatccagagattttttatctgcttcaataacggggaacagagacaatacaggaatccccagccgggcaatctcttcagcttctttcagcaacagatccatcgtcagacgatacactcctggcatagagggcacttcttgacgacgattaatgccctccatcacaaatacaggatagattaaatcattaacagttaattggttttcagcaaccagacggcgggaaaaatcatggcagcgcaaccggcgcatacgtcgaccagggaaagttcctggaaatgcatagctcatatagctctcctaacgcaaacccagcgcactcgcgctgggttaattaatatgctatcgcttcgtgctaattatcttagcactacagaacagcatgctaagatcactattatcactcttcccgattcacttctggcgcttcctgctcatcttcctctgaacgatgccccaatccccgctgcccggtataaaaacgggagagccaaatccccagctgacaccgcaaatccctaggaatcgcccgcaaggttcgccacataacatccggcggcgctaacaccatgccaacacaaaggccccgacacaatatacggccgctgtttctcccagcatccgcgcgactaccccatcccacctatcaaaggacggcagcggctccttgagaagacacaccaccggcccaaaccgtgcctggacaagcttaagcgcgcccgaatcccgtgccacaaaactacttccgtgccctcaaacaaa

SEQ ID NO: 5573 - DNA, 697 bp, Photorhabdus luminescens
  misc_feature (279)..(279): n is a, c, g, or t
tgcggcaaagtctcgtgaaaaagaatacaaacttactgatgtataaggtttgtctcttctcatcaaacccagttgttcaaaatggtggtatctgaaatatcggtttgcgggtagggaaagctagggagcaacacgatagtattaagataatgatctgtaatggcatcaatctcagtaaaaaaaggaggtagaaaaacaagaaaatgtcaggctggggctgaattattagccccttaataacctcaagtattatttgatattggcaaaggtgcacagcantttagctgcacactaatacagtgccaggcccaacgcctctttctccgctagctataaagcactaagtcaaagcttcggcttgtactggttaataacccgatgatcgcaatctttagctattcgacatatagtgaagctatcacgtcagcggttctgaaccctaccttaagcttaccgtgactcatattccctatctaccctttctacgtgcccatagccgattccatcccactcgtatccattctgtagctcacccccgtcacctcgtcgacattcgtccctttctgtccagggctccccatcctcatttacagcaccatttgatcctttcctcccttcatatcaccaaccagtactacccgatcttcttccctccgccctcatcatactcccttttaacctcttcttcaatccatct

SEQ ID NO: 5574 - DNA, 760 bp, Photorhabdus luminescens
  misc_feature (430)..(430): n is a, c, g, or t
  misc_feature (630)..(630): n is a, c, g, or t
cccgcagatggattcccatcgtgttattagcaagatgtaaatcttccacaggataaatatcagacattcccggaaccaaaatacggcaggcataaacaccaaggtgctcgtagtcagcaatataaacttcggcatccaattgtttgaagatagccatcaaagtggcgaattcttcttcggtcgtgccgctgaaactccagtcagcgaacgcataatcagcatcttgtttgaataaatcccaactgattaaaccgctcgaatcgataaagtgagtttccagattagtatgttctgccacttcttcattatcaaaagtcggcgcattgaacacatccagatctttcaaactgcgtccttgtaataattcggtcacagtacgttccagtgctacaccaaattcaggatgtgcaccaaaagaggcgaaacaagncccgttattaggattaaacagcacgacgcaaataaccgggaactgcccactgagagaggcgttataacactagagtgggaaaccctgatcttgtaatttgctgactgcggcaacaacgtcgggataacgattcatcacttgctgtggaatttctggcaggctgatgccttccgcgaaataccatcttgcacatagcggtnaacaacttcaaataatgcctgacctctggctgtattcatggtgtgcacggctgactactctcgcaacataaagaccgtcatgatattctccgacatagaccgttcgtgatcccattgccatcattcgcaa

SEQ ID NO: 5575 - DNA, 691 bp, Photorhabdus luminescens
  misc_feature (395)..(395): n is a, c, g, or t
atctactctattatagccacgactattaataaaaaccgtaaagcaaagaaaatctctaaagataatttccttatgcctcaagaattttggcatgagttcaaaaatttttatcagaacatccccactcaaacaaatatcgatgatcaattattaaaaaaatccattacggaaagtatcgacaaacttgaccaaaataaatttatggagaagcacagtgaccgtaagcaaactattatcaacaatgagagagaagctattctgcaacaagatgaaaggattaacgaaattatttcaagcagagcaaaaatgatacagcaacgagaagctgaaaatacagaaggatatatctatcttgccccacacaaaaacacacttttggaatatatgaaacattnacaggaagaaaaaaatctatttcttatattagcagtcaaagaggacatattcaccgaaaaaggattagaacaagatccacaagaacctcatggggccgtcagatataagggagcattatctacagaagaacttaatcttcgtaatcaagaaggtcaaatctgtgcaatacctgcatctattggggaaatggattatggcgattctattttaaatcagcagcaagccatagaattttgtaagacataaaatgagggtaaatataatttccaacatcaaattatatttaccagagata

SEQ ID NO: 5576 - DNA, 784 bp, Photorhabdus luminescens
aagctttggctaagattcgtgcatctcaatttgattttattatctctgattggaatatgcccaatatggatggtttagagttactaaaaatcattcgtgaagatgcccaattggccaagataccggttttgatggtgaccgcagaagcgaagaaagaaaatatcattgctgctgcgcaagccggggccagtggttatgtcgttaaaccttttaccgcagctactctggaagaaaagctcaacaaaatatttgaaaaactgggcctctaaggagacataatgagtgtaaatccagtcatgccaagggatgagaccattagcgccagtgaaattatcagccgtatcggccagcttacgcgcatgttgcgtgatagtttacgtgagttgggattggataaaactattgctcatgcggctgacgctatacctgatgcaagggaacgtttggactatgtcgtgcacatgacagcgcacgcggttgaaagggcgctaaattgccgtgaatcggggcaccctgcccagaatgacgcatagccgtccgcaatatgcgctgaaagagcttgttgatcagtcgtttccaaacccatttgagatgcctgcgcgccgctcagtgttccgcatacaccgcatgccgtcacgccggtacgtggacatcctgctttgcctcctgcttcattgttgtatatgatatatcgagatcacttcgctgatccgtgccgtgggtgcgtactaggtgcaatggctcggcctacccaatactagaacccccgaccccgccctgcagt

SEQ ID NO: 5577 - DNA, 705 bp, Photorhabdus luminescens
  misc_feature (414)..(414): n is a, c, g, or t
gggtattacaccgcaagcaatgattggtcatagcctcggtgaactggttgcggcctgtgtagggggtatgcttgaactggaagatacactggcattggtagcaaatcgagcggcaatcatgcagcgccagcccacaggagcaatgctggcggtacaggcatcatctgaacgtatggttgcgctggcaccggagtgtgaatttgcagcactcaacgggcccgcacagtgcgtgataactggcagccatgacaatattgcggtactggaagaacaatgcaacaaggcaggtatttcttgccagcgactaacgacatcacatgcatttcatagttcattgatggatgctgccgcacaacagatgccggaattcatcgcatgcttcacgctacaattcagtaccattccgatgatatncaatatcagtggccgttggctcagcgaacaagatcgccactattctggttatttgcggagatcatctgtcgtcggcagtacgctcctatgacggtattcttacgtcactgaaccattttgacaatccgatcctgctttgattcctgcccagggccgtgcactgaccaccatgcctgaaagatctacagcatacaggccaagcccacatactaaccccgatgctctcttttttgttcggcaaacccggaggaagagggcgtgctcaataccgcttggtatttattgcatcca

SEQ ID NO: 5578 - DNA, 765 bp, Photorhabdus luminescens
  misc_feature (712)..(712): n is a, c, g, or t
  misc_feature (721)..(721): n is a, c, g, or t
ccggcttgtcgtaccccatacccaatgcagtagttgccaccagcaccttaagttgattggttagcaataactcttcaagatattgtcggtaatcgttactgttttcaaaaccatcagcctcaatactgctatggtaggctctggcatttatgccattgacgttcaaccaatttgctacctgttcggcatcacgcactgttaaggtgtacacaatgccagtaccatgcaatgtgggaatcacttgcgccaaccaagctaggcgagaggattgatcaggcagcaccatagtttgtagcgagaggctttcacggatcagtggaccacgctggatctggatattacccagttgtgtttggatatcagccaccacgcggttattggcagtggccgttgtgcctaataccggtgtattaggtggcaactggcgcaaaatattgactatacgccgatagtctgggcggaagtcatggccccagtcggagatgcagtgggcttcgtcgatcaccatcagagcaatacggtcagcgataggatgaagcacggtttcaatgaagttatcattggcgagccgctcaggagaaatcagcaggcaatctatttgattatttataatcctttgtgtcaccgtctgccagtccgctgtatcggtggaattcatagtctcggctatgatgcgcaggcgctgggcggactccatcctggtacgcatcanaagccgcanaggagatccataatcgtcggtccatgccgcatcacggaaatttt

SEQ ID NO: 5579 - DNA, 694 bp, Photorhabdus luminescens
  misc_feature (682)..(682): n is a, c, g, or t
aaatcaggatggaggcccgtaaccggttatatgaccagagcagaagccctgcgggatataagttttcctgattgattattacaactggagccagccacatcagttcaacgaggaagtgccaccagcaaaagctgagactctatctaatattatttactgcccggaactagttggccactacaatttaagcaagcgcaaaattcatcaaaatgagtgttgtaaaaacgaggatgaccatagagttatactctctctcatctctctcatctctctcagaaaagcccgtccagctcatctgcattcacctttacccgttcttcccactgctgttggtcgtccatcttccacaccgtccgcacccaccctttacccggtgcatttggccatacaaacgaacgcccatccgtcggcgcgtaattgtgccgcagaaaaacctcgcccgtggatggactcacccacaggctccggtctgaatcgatgttccagttcgccgaacagtgcaggtatcgcccgatgatgtgcatctcatcggtggtgaagctcactggcgtttctccctcgcgcacagcccgtccctgtgctatcgctttctcacagagaggggtcagctctgaaggcagttgcaacttcttgttactgctgagtattggggaaaaataacgtcagcgttctgtgcctgttncagcataacccg

SEQ ID NO: 5580 - DNA, 755 bp, Photorhabdus luminescens
aagcttcccgcaaaattttatcaaatgttggctcacaccaatggctgaaatttgtttgtgaagcgatagccgcacaacttaatagtggacggaaaaaactgtctgggtcattactgtcagttgaccagcctgataatgtcatatcgtgagatttatccatcagtttggtttcctgaaagcggccctcaacaggtttgatgctcatggtaataccaacttgggctaaatcggcctgaatcagttctgccattttgagtggacttggattatatgattgagaggcggaaggtacccataaactcaattgcaagccattcaatccgagatcattaagtattttacgggatttttctgggttatattccgtaatttcagtttgattatcataagcccatgacgctctaggtaaaattgatgaggcggtttccgccgtaccataatagatggattgcatcagccgttggttattaatagcgtaagcaatagcttgccgaacctgtagcttatcaagcggtggcttgctggtattgaaagccagataagcgatattcattcctgggcgtaaagttagacgcaggcgaggatcatctcgtaaaacagtaagctgactggcagcgggatacgctaatacatcacattcaccggttaaaagtttagacattctgccggtgccgcccggcccgacgtcaataactatctggcgcatttgtggtttgcctttcagtatttatcatgaccaacccgaccgcataatg

SEQ ID NO: 5581 - DNA, 675 bp, Photorhabdus luminescens
  misc_feature (479)..(479): n is a, c, g, or t
  misc_feature (595)..(595): n is a, c, g, or t
gctatcatgtattttattacggccagaaagcccattacggcgttgcactgttaacgcgccaggtgcctcttgcggtgtatcgtggttttccaggggatgatgaagaggctcaacgccgggttatcatggcagaagtggaaaccccacacggattattgaccgttattaatggctatttcccacagggagaaaaccgtgaacatccagtgaaatttccggcaaaagagaaattttatcaggatctgcaaaactacctggagcaaaacttaacccctcaatcacacgtgattatcatgggtgatatgaatattagtccgaccgatctggatatcggcattggtgagaacaaccaaaaacgctggttaaaaacaggtaaatgttcttttctgccagaagagagagattggatggatcgcctgaaaaactggggtctggttgatacattccgccatctcaatcctgaatgtaacgaccaattntcctggtttgattatcgctccaaagggtttgatgataatcgagggctacgtattgatttactgcttgcaagtaagcctttgatggatcgctgtatcgcaacaggtattgactatanaatccgtgagatggaaaaaccgtcagatcatgccccagtttgggcagaatttgaaatttgatattcccgtaacaccgaat

SEQ ID NO: 5582 - DNA, 747 bp, Photorhabdus luminescens
gagaaaaaggtattaaatatataaattaattttatacccgtcatctttcaagttgcctctttgttggctgcactcgctcaccccggtcacatcgttatctatgctcccggggattctctcccttgccgtcgcgatccatcttgaaatccagagggtatatatttaaatcgacttcgccaataaatataaataatagcaacgccagttattatgctggcgttggctattttatgagtgattattgataatcactgacaggtgcacaagagcaatgcagattacgatcaccgtaaacatcatcaaggcgtttaaccgcaggccaatatttattggctttggtttccaaggttgggaaaaccgcagtttcacggctgtaactatggctccagtcagaaaccagttcagcttgtacgtgaggcgcgttaaccaatgggttatcttctaatgaccactcaccttttgccactttgccaatttcagcacggatcgccagcatggcatccacaaagcgatcaatttccactttgctttctgattccgtgggttccaccatcagcgtgccggcaaccgggaatgacatggttggcgcatggaagccatagtcaatcaagcgcttggcaatatccatctcactgataccaaactcttctttcaacggtcgaatatccagaatacattcatgtgccacataaccgttatgacccgtatacaacacgtcataatcattctttaagcgagcagcaatat

SEQ ID NO: 5583 - DNA, 668 bp, Photorhabdus luminescens
cgcagaagaagacaaaaatgatttcgctgaaaatagcgcttatgttcatgcaacgccggtgatccgtcgcctggcgcgtgaattcggcgttaacctggctaaagtgaaaggtacagggcgtaaaggccgtgttctgcgtgaagatgttcaggcttacgtgaaagacgcggttaaacgtgcagaatcggctcctgcatcagccggtggtggtctgccgggtatgttgccttggccgaaagtggatttcagcaaatttggtgaaattgaagaagttgagctgggtcgtattcagaaaatctctggtgctaacctgagccgtaactgggtggtgatcccacatgttacacagttcgacgaaacggatatcactgaagttgaaaacttccgtaaacagcagaatcaggaagctgagaagaaacagcttggcgtgaagattactccgctagtattcatcataaaagcggtagcaaaagcgctggaagagatgccgcgctttaacagctctatctcggaagatggtcagaaactgacgctgaaaaaatacatcaacattggtgtggcagttgatacacctaatggtctggtggttccagtgttccgtgatgttaataagaagggcatcattgaattgtcccgcgagctgactgagatgtctaagaaagcgcgtg

SEQ ID NO: 5584 - DNA, 748 bp, Photorhabdus luminescens
  misc_feature (718)..(718): n is a, c, g, or t
catcctgatatcaatctgtccgtcgagtacgggtgagtcagcagtactttgcatatacagctcaaactcctgcaccagaaactgacctatccgcctggaggtggctagcgcatccggtgacgccatttttaccaacgtatgggccacttcggaatcaaaacgacgaccaaataagttgtcaatatattgggtagttgacttttctctgtgagcatcagcctgtaatgacagtaccaaaccatgtaactcagggtatgcctgtaactgactggcagcatcatcaaataacttgatagtttccttcgaggtgacttgtccggtgagccagagtcccctggcccgtccaatcaaaaacctcgcttccgggatattcgcggtttccaatcggctcataaaagcaatcagactttcactttcggtcttaggcgcttcccgttcagcggttgaattcgttcgggtcaacggggtaatctgccattcaataagacgattaatttcgttttgtgttataccgccttttaaaccgacaacacgtacggttccatcaaagatgacgcgttgcgtaagatgttcagcatgttgaggtgccacggcgatcccaaggacgccagcggattcagctcgctgagcctgtaagtgctctatcattccgcccattctaaaacgtactaagatcacctgattggtgcgtagagcatactcctttgggctatgctgntgccatcagctatcccccgttcggctataa

SEQ ID NO: 5585 - DNA, 669 bp, Photorhabdus luminescens
  misc_feature (116)..(116): n is a, c, g, or t
tactgtccgcgggaagctggatgttcaaaataaccgctgtattcgtcaggtacagtggttttttgtttgatcaatttgtttgatcaaatagcactgagcgcaggcccttccttcanataggggataagtagttatcggagtgtgtaaacttgacgttaaacactccgaattttttgacattaagtggatgtcccgccgtaaccgaatagcggctggcgtagccagagggcggggagataccctcttgtatgatttaaagggatttttgatgggaaaagcatctaatagaagtgcagtgtacctctttacaggaagatattacgacgataatggcggtaatcgtattactgctgttggggctggtggtgaagtttatgcttatggcggaaatgatgatgttaccgttggttcattgaaagtcgatgtataccatacagatggcgaccttacggtaaagggagtgtcaggttataccggtattcataaaacgggaaatggcgtgctgtcatttacggaggctgccggtgtagctgctattgatcacacgggtgaaacgggaaatttatattattcgggtgcggccggttataataaactggtccgtaaagggttgtctggtgatactccttttacaggggccggtggatacaaatcagtatggcatgaaaa

SEQ ID NO: 5586 - DNA, 770 bp, Photorhabdus luminescens
cattaagccaggagaagtctgaaccacttccgccacgacggttcggcccacggtgccgcactgtttgcaatagtcacagccctccccctgtagacaaaccgattccggctgacaataaagattcagccgtttcagcaaacgctcggagacttcttgctcatgcccttgcaggggaactttacaatgaggacataacacctgaatcagcgcttggctgaccaaaccaatcaccagccgcgaatccattaatagtgacgccatcaccgcctcatcctgcaagcggggcaaaatcgctaaagcatcgtttgcatgtatcgtggtccaaataagatggccggtcatggcggctcggaaagtcatctttgccgtcactgcatcgcgtatctcaccgaccataattacatcaggatcgagtcgcattgcatcagcgattgccattgcccattcttgctcgataaccacgctatcaccccgatcgccggtgataggcgattgattagccccttcaatctcatattcgggagggtcttcaagtgtcagcagatgaatgccggcctgctcggttatcatcttctgcatcacgactttcaaagtggtgctcttgccgctacccgtcgcgccggatagcagcaccacaccggcccgatggtccatcagctcttccaatatctgacactgttccggcaaatagccaagatcgcttagggtgcacacggtaccggggctatccgcgtacagcaatcgcaacaccattaacatgccacgatcaa

SEQ ID NO: 5587 - DNA, 759 bp, Photorhabdus luminescens
  misc_feature (730)..(730): n is a, c, g, or t
caccatcctgccaaccaaaaagctgtcgccacaacgtggcccaatcaatcagtgaataaaacgccgcctcagtcgggatcttgccaggggcgaagtgggtaccaagctgactgaccgtttcatctgttatctctttcaccatcgtcttttcctcatttagctagtcgtaaaggtaaactttcccttcgccacttttccagccactggcaccaatcgccaatgtattggcgtcaccgctaaaacaaacaccggcaccaaatttatggtttgattccccatccagctccagtaatttgctctgcataatccattgttcattctgatagctaaaccaccataccgcaccggtttgcacacctgtgtcatttttaccaacaggtgttgacaccaccagcatctggccgtcactactcaaagagagttcgctgccaaacctttccccggcagtcaccgcttctctcaatatccctataacttgccatacattacggtgacgctggtacagatagaccgcaccaatattgttcttctctcccgggcaccccaccgccagaatattgccgctatcgctcaggctgagactggcaccaaagtcgtctttactgatggttaaaggcgaagtcagcgaattgagtggcagttgcggttgccagtattccccgtgacgatgaaatatcgtcacttcaccattaccattacgccccgttgccgccactgccaaggttgaacncatcgcactcaagctaagtttgccgcaaa

SEQ ID NO: 5588 - DNA, 680 bp, Photorhabdus luminescens
  misc_feature (646)..(646): n is a, c, g, or t
tagctggcaggccagcgcatactcaacagtgaacagcgcaggttgggtataacgtgtagcatttaaccggctgatagcattgtcgcgctccgattgcggataaatcaactgcctgatatccagtttgatgtgtggctgtagcagttcggcacagcgatcaaattgctggcggaatacaccatcacgcagatagagcgattgccccatttcaatagactgactgccttgtcccggaaacataaaaatcaccgcacgaggctgttgtttgcgattaatcgtctgcggtgatagttggcgtagttgattgattaattgctcccgatcttttcccacaacaaaagcacgctcactgaaagcgctgcgtccttgttgcaaagttccggcaatatccgctaatagctcattaccggtagtcaatgctactgccaagcgttccccttgctgaagcaacgtttgcggcgttttcgctgaaattggcagcagatgccagcgctcgtcatctaatatacgggcatcttgctggcgcggagcttcttccagaataaggtgcgcattactgccgccaatgccgaaagaacttacaccggcacgacgtggctgacttgtctgcggccacgggcatgctgtattgatcacagaaaacggngtctgttcgaaggggattgcaggattgggttgaa

SEQ ID NO: 5589 - DNA, 764 bp, Photorhabdus luminescens
tatgtctttgtctatttaatggtggctttattgccttggtttaatgaaaccatcacattattgaaaactgcgggcgtgatttttattttgtatggtgtctggttgattagccgtccagaatgaagaaggaaataactatttaactgttttacttaaagtacagacttgtttttttattgagttctggatagagtcaccttgctttgctgattttatgaggaggggttaatgataataagaataaaagagttactcttattgttcagtctgttacttattggctgttccagtcatgcccccaggactccggctcctgtgttaaagacggcgctttctgatccaatcatggtgattgctcagcttaaggagcagcttaatcaatggcgtggtacaccatatcattatggtggaatggatcgccggggggtagattgttctggttttgtttaccgtactttcagtgatcggtttgatattcaattacctcgtactaccggtgggcaaataaaattacggacccgtattgataaaagcgatctaatgccgggtgatttggtctttttcacaacagctagtggcgaacatgggtacatgttggcatttatgacgcccataaccagcttatttatgcatccacccattaaggtgtcactcccccatctatgactaatgcgtactggaacaaagctctttgccagcccggagacttaactgcgtcttatcccccacttgcccaatatttttattaagatccgcccgtatga

SEQ ID NO: 5590 - DNA, 688 bp, Photorhabdus luminescens
  misc_feature (376)..(376): n is a, c, g, or t
  misc_feature (427)..(427): n is a, c, g, or t
acggaattaatgaaggagaggttccatactccaccatagccgaaatggtgattcaagacataacagaaatcaaaaaattacaacctactggcccatacacgctatggggatattcttttggctctgtattggctttcgaagcggcttaccaattagaacgagccggagaacatgtcgaaaaggtggttctaatcgctccagggctctcgaagataaaatatcacgttaattccacgggaacagaaaacgggtctacttaccaaaacaatgagttgatatcactattattctctgtatttgcgggcacttctcacagttcagcgttgaatgaatgcctggctaacgttatcgatgagcaaagctttgtctcttttgntcataagcactacccaactctggcccctacgttaattgttcgaattgccangatagttattcaaacctacggacagaaatattcagcaacagatctgcaagatcaataatcaaggcgccaattacggtgtttaatgcacgtgacgatgccgtttcttttatcgaaaatgcaacaccctacctaaaacatcccccaaaaatatcaatcttaacgttgatcattccgaggtacttaaggaatcaggtgttaacaataacctcgattcttgagttgattgctgctgcaacaacacaattgaaattatttaagggg

SEQ ID NO: 5591 - DNA, 778 bp, Photorhabdus luminescens
  misc_feature (443)..(443): n is a, c, g, or t
  misc_feature (467)..(467): n is a, c, g, or t
  misc_feature (570)..(570): n is a, c, g, or t
  misc_feature (572)..(572): n is a, c, g, or t
ttggtagccagtgctcaaatgagataaattcttcgatacgtgcgttgtcaggtatgttctctggctgtatttctattgaactaccaccggtggttgctaatacacgcacaggtaatttagccaatgcacgtaatgtggggaaaattaactggtttagatcagtattagacatggtgccctgagtgactataaccaatgggcgtggatcatcttcttcccataattgaggtgattctgttatcggagcagggttagggagagggccaataaaatggacagtatcaggcaattcctctcgtgggtattcaaatgccagggttgaaagttgcaaaaaacgatcagaacccaaaataacttcatcgttgaaaaatctggttaacgtagtgcaccctgactgagctaatgcgtcattgaagctatcctgtacttcggttatgagttgncgggtttcctcgtctacgagttgntcatgtgtcaattctgatggtaatagtgcgggtgggatacgtggcccccagaaaatggaatctttcgaagagtaagccacaggtgttatgtcaatgatgatcncnggaaggcgatgagctgtttctttttgcaccactggcactatgctatataccctatcgtcccctatcagtgccgcttcttgatgttcctgcatcacaaactgtttctatgtgttttccatttcccacccctcaccatcccttcttgtctatatctgtccagcccgacatctctcccccttattttatcccctcccctctcttcctta

SEQ ID NO: 5592 - DNA, 700 bp, Photorhabdus luminescens
  misc_feature (389)..(389): n is a, c, g, or t
  misc_feature (436)..(436): n is a, c, g, or t
  misc_feature (466)..(466): n is a, c, g, or t
acagagaatggtctaaaatatcaccactgaaacgtgctcgtgtcatgttccagttcaaaacattactggaagctaatatagacaaactggcacgattgatttcagaagaacacggaaaaatctattcagatgctatcggtgaattaactcgtggtctggaagtcgttgagtttgcctgtggcatccctcatctacaaaaaggtgaacattccgcgaataccgggacaggagtggacagccattcattaatgcagcctttaggcgtttgtgttggcattacccctttcaacttcccggcaatggttcctatgtggatgtttcctatcgcattagcgacagggaatactttcgtattgaaaccttcagaaaaagatccctctctcgcgctngaattagcatcactacttaaacaatccggtttacccaatggcgtatntaatgttatcaacggcgataaagaagccgncgatatactactaacagatccacacgtgcaagctgtcagctttgtgggttcaacgcctgtcgctgaatatatctacactaccgcctcagctcacgggaaacgctgtcaggcgttgggaggcgcaaaaaatcactgtattctgatgccagatgccgatctcgatatggctagcagtgctattgcatgtgcagcatttggtgcatcacgggaacgttggatggcactgtctgttga

SEQ ID NO: 5593 - DNA, 770 bp, Photorhabdus luminescens
tatccgctgacaaaataccccatgcaccacaaattaaatctatagaaggatcacaaaaaagcccaatacccaccgaattctttgagctaatttctgacagacaataccctatctctttcaccctcaaatagaaatcagcgtaactgagagattcttcttgatcaataacaacatatccatctgcctggtgcttaagttgactctcaagcatatccatcaatgttattgcttcttctttaagataaacatcattgattgagtcacattgtgtaatattattttctaacattttcgataactttatataataataaaatgaatatctccgtagttaaaaatgacattttatctacggaattataagtgcctttttgctcatgatttatgacttatattttattaaaatcatgcaatcagttaaattcaacaaagacatacctttcgaggcagattaatacccttaccaattacattattcaatgctctccgaaaataaaacggttattattctccacggtaatactggagtatttttttgtagtttcgtgataaaattcatctcatcacgatatggaattatcaatcaattaattcattattctttaaatattccaatattattcaattggtgcttcttcgaaagaaggaggaagcaaaggagtacttgtaaattgactggatgctgccctataaatagttaaaccctgttctttcacaattgattcatcacataaaccagtttcggattatgttcttcctcttcctctatg

SEQ ID NO: 5594 - DNA, 689 bp, Photorhabdus luminescens
  misc_feature (354)..(354): n is a, c, g, or t
  misc_feature (510)..(510): n is a, c, g, or t
tctgaaatttactgggattcagcaacacttgagggctggaaagcacgaaacgtccagggtgggtatgctgtaaagtatgcaaatgataagttttctttgaggaggacgagttggcactgtctcttaagtcagacttatgatcaagagacagctatttgcgtgagatttgttagcggcccgggggatgtagggttcttatgcttttcgataccatcccattaacttaatatatgaattggtaattgaaatcgctgcattgccaccagaatctccggtgttacctgaaattgtatggttatgtgctcctattgataccgtatgagagtgggcaccattagtgctagtgttaaattnggcattgttccaatctgtagattttgatccctgattgttcttagaaccgtcgaaatgaccataacgcccaccagtagtttcaccccacccactatcatgataatgctctccggcgatattggtggttttggtgccataatcaaatgtgctcgttgncccaaaaaatgtatgattatgtgctggcatttgtgctgctgtcaggcttatcaaatcattgccacctgttgataaaatatcggatccattggcgctagctatccaatgggcttattttcaccatatattcccatgtagaccccgaaataacacattggcgtcttattttgaccgaacaa

SEQ ID NO: 5595 - DNA, 777 bp, Photorhabdus luminescens
  misc_feature (579)..(579): n is a, c, g, or t
aagctttctatctatgacgaccgacgtcaggaggaacgtaaccaactggaaacacaggcaacgctgtgcatggaacaatgggaatcacagtcctattacgcacgcgccgttaacagttatcccagtttacaagtggggcatcagtttaccctgaaagggcacaccagcgccgatggccgttatgccgtcggccaccagcgattaaaagcggagaacaacctggaggaaggtgaattactgttttcgtctcaggtgaccttattcccggcgaataacgtattccgtccgcgtccttcggttacgcggccctacatttccggcgtattgtccgcgttggtggtagggccgacgtcagaagagatccatacggatgaacagggtcgcatcaaaatccagtttcactgggataaagagcataaaaaagatgatgacagctcctgctggatacgggtcagtcagttctggaatggcgcaaagtttggtgcacaatttgtgccacgtgtgggcaatgaagtcttggtgagttttattgatggcgacccggatagcccgctggtgaccggaacggttcataccggngtgaagatgccaccattcgcgctaccggggcagaagacccaaagcgggattacgacacgcagtagtgcaaaaggcacggcggagcaaggacatcacgtctgtttccagataaaaaaggcgaagaggttattttgctccattacaaaaagatatgcgcctggaagtgaaaaatgatttctccgcgcacatcgatcgcaa

SEQ ID NO: 5596 - DNA, 682 bp, Photorhabdus luminescens
gagttttatcgctaaaaatagttggcaaaaaaattatgtctctgtttattaagcaatatttaattaaaaaattgatcgcttaaattgtcaaagtgaatttttaatgtttaagttttataattttccataaaattaacactttatagtgatatgagtgttaatatagctttatgtctattttacgtattcaagaccacatgacagtaaatgatgtttgtgtgaataaattaatattcatcttgtttcgatcttcaactatttaagatgtttattaatgtgattattaataactccactgctctctaatttctattccaattgaatttaagatatttttctcccaattatgaaatattttattactcgttgtcatgaaatttatgcgggtgatatctatactatcatttgtaatctactattcgtgatcataggctagtactactgattcgtcattttgtccgagaactaatatgagttatcatgacgtcaaagcgatgtataaccgatatccatatcctagttctgctattggagacaatcttattcatgacatggctaccgtgataaggcctatatttaagccggatcatttaacgggaaatatgcgcttgatttaggctgtggaacggggcatctgtcgttacggctggcagtatgtatccccacacctatttgtgggttc

SEQ ID NO: 5597 - DNA, 761 bp, Photorhabdus luminescens
ctgagtggttatccctctcctgttacaaatctgcctgcaactttccctgagttattacaaaaatcgccccatactcatcctgttaattcaccaataccccatgatttaaggaataatgtttcccccagtacggttatcgctaaaactaacgtgacactgacagccaaagataaggtgctgtttgctggagattcaatgatgcagggtatcgccccccatctgaaacgtcggctctaccaggattacagtatttcaagtattaatctcagcaaacaaagtactggacttgcttatcccagtttttttaattggccggaaactatcaataaaacactggaagccaaccatgatatcaagctggttgttatttttttggggccaaatgatccctgggatatgccaccaaaacatggaaacatctacctgaaatttgccagtcctgattgggaaaacctctatcgccaacgtatcgaaatggtccttaccgaagcacgtaaccacggcgctgatattatctgggttgctccttccaatatgcgacagaaaaaactctctgccaacatgaaatatctgagatccttgcatcaatcagaagtcacgaaagccggagaatctatgcccctgtaatgatattctcaaatatcatgcacatgattattccgattatgtcggcgacatcagcacaaaacgacactcagaagcggtgatggtatacactttagcctgaaaggccggctactacctcacacaacatattttct

SEQ ID NO: 5598 - DNA, 685 bp, Photorhabdus luminescens
  misc_feature (440)..(440): n is a, c, g, or t
cgtggatatctttaccaatggctacaccgcatgggttagcgtgcttaacaataacgcatgcaggctccacgaattccttaacacattccagcgctgcatcggtatcagcaatgttattataggaaagagccttaccttgtaactgagttgcagttgcaatggatgattcagaaagattctcttctatatagaatgcagcatcttggtggctgttctcaccgtaacgcatatcctgctttttaatgaaattcaaattcagagtacgagggaaacgtcctgatggttgagtcgtatcaccatgataaggaggaaccagcttgccaaaatagttagcaatcatgctgtcataagccgcggtgtgttcaaaagccttaatggctaaatcgaagcgggttgattgtgttaatgacccctgattgttatccatctcttcaatgatntttttgtaatccttactatttaccacaatcgctacatctttatggttcttagccgcagagcgaaccatagttcgaccaccgatatcaatgttctcaacggcatctgccaaagtacaatctggtttacctacggtctgagcgaatggatatagattcacaaccaccatatcgatcggtgagattaggtgttgtgccatgatttcatcatcttgtacgcggcggtcaaggattccgccatgtacttt

SEQ ID NO: 5599 - DNA, 777 bp, Photorhabdus luminescens
  misc_feature (662)..(662): n is a, c, g, or t
aagctttaataccgggctctatttcgttgccggattgctggtcgttggcgcagccattatctggttgatcccaatgaaacacgccagacagagaacagcgccgtaattttcaataaaaaggaaaaaccatcatgactgagcctatcattgccaatattgatatcagcaaggattatgatgaaacccaaggcactgatgatgtgcactatcaaacctttggtcggatggcagcattttttggtcgtaatatgcaagctcatcgtcacgatggtttcttccaacttcattttttgatcaccggccatattgaattacagttagatgctcaacactattctgtacaggcaccgctgtttatcctgacaccgccctccgttcctcacgcttttttcactcaagatgacagtgacggatatgtccttaccgtacggcaagatctgatattaccgttattggaatcactctatccagctaataaagatattcttgatattccggctatttgcttatccgtcgtcgataaaccggaagaattggccgcttttaatcactattgggcgttaatcgcccgcgaatcatcgaataactttattggtcgagagcaatcgctgacatttttagcacaagccatatttacccagttattgcgcaatattcctctngatgatcacccggttaatggcgtgcgaggagaaattaaattgtctcagcgctctaatcaattaatagacaatcattatcatcatcatctttccgtaccggaatatgctcataagt

SEQ ID NO: 5600 - DNA, 690 bp, Photorhabdus luminescens
  misc_feature (521)..(521): n is a, c, g, or t
  misc_feature (526)..(526): n is a, c, g, or t
tttccctctaaggattggtacacctgcgccagagaaaccgtgcgttccacttccagcgcacgttgttcttgtttcaggtgcgcatcttccatttgggccagattcaacattaaggtttctccggcaagcagaccggcataggttccttgccaggctcccggtttaataaagcgtgcagaggtatcattggtttcccaacggtaagcttgttctgccatcagacaacgggcgacgactaaatcgtaaaattggaagtaaatggcagctaaccgaccacgtaaccagttgtacagcgcttgattgctgaattttcgttgcaggaaagccagttgagcttgagtttgttcctgttgggttttcaggctggttttttgtaataccgccgcttcacggcgcactgttagtgattgaagttgagcatcgatctgtttcatctctgcttcggcattattacgctggatttcccactcctgacgacgacggcgccatatttcagattgcgagactttctccgcttcatnaacanaccttctgcggcgatcccgccaccaatagcaatggcattggcaattgccccaaagcgtgttcccccgaccgcatagccgtagatattgggtaccatctgcagcgcggcggcagccatgtgcaagcctttcatccgctggaatactttgggaagctattcgatat

SEQ ID NO: 5601 - DNA, 772 bp, Photorhabdus luminescens
  misc_feature (231)..(231): n is a, c, g, or t
attcaacttcgttacgtgtgactatgacggaaattcttgatcgtcacccatcccccggtcgtgatcgcagtgaggatctttattttggtgtgctaagtttccccgtagagagccacattatttactaccgggaagttccgacgggtattgaagtgttggcggtgttgcatcaaacgcaagatccacataatcatctataccctatggatttcaagatgcatcgcgacggcnagggagccaatccccgggagcatacagaacgatgtgaccggcgcgagccagtgccccccatacccacgcaacttgcaagatgacgggtctatactgaagagcatacaacgcgggaccccttattcacctgcttaatccactaaccccctcaactttgtcatcccatgctcccgtcctttacctgtacgtctccttccttatacatgcttcctgtccatttctcccgcccccgctctgatacttttcattgtattcaccgcctcgctatccttcccccgctctccgcctgcgtctccatcctccggcccgctccgctgttttctttccttcctttctcccccccattctttattcggcgcgcccttcccccgaatccccccgtttaccccctcgtccccccaatctttcgggtaccacgtcttcaaccgtccggtattcactctaattgttccgagttcctacccgtctcgtcccgttgggctactttcgggcgtgcccatccgctattcttataatgtatcccccgaccactcccttctca

SEQ ID NO: 5602 - DNA, 666 bp, Photorhabdus luminescens
  misc_feature (462)..(462): n is a, c, g, or t
  misc_feature (464)..(464): n is a, c, g, or t
ggctcatcatgcacttttggcaccacaatatggctgcctttgatcaggcgaataccataaggtgatttcaatttcagaccatcgtcaaagaattctttaacccaagggccggtagcattaaccagaccttttgcacgccaagtataggtcttacctgtacgcagatcttcggcttcaaccatccaaccctcttgttcgcgccatgcacgggtcacttttgttcgggtacggacttccccgccacgttttttgacttcttgagcgttaaggacaactaaacgagcatcatcaacccagcagtcagaatattcaaagccacggaccaattctggtttcagaacagaattggcaccgaattttagccctttactgccaggcaggctgactcgtttgcccaaattgtcatagaggaacaggccaatgcggatcatccatgctggacgtaaatgtggctgatgcggnangcggaaacgcatcggaaaagccatgtgtggtgcaagattcagtaaaacttcacgttctgccagcgctttactgaccaaacggaattcatagtcgtctagatagcgtaagccaccgtggatcaatttccactggaggatgatgtggctttggctaagcctggcgctccatcaaagaaacagagccccgtcctcatcttctcta

SEQ ID NO: 5603 - DNA, 681 bp, Photorhabdus luminescens
ttaaattgcttcctgaggagacgcggaaacaaattgccaagttgttattgaatgctgagacagaaaacagatgacagagaatagatgacggtgactgcctaatacggcttttgaggacatattatgactgataaagaaatgagttctgttgactcattgaaagcgagttttaagtctggtgttccgcctatgcctgaagcattttctcatttgattgatgaggcatatagggcatatgaaatcattgatggtgataagcgggatggcccgaccgcagggctgggacgagatgacaaaggaaaactagccctcaacactcaccattctggcgggttaaaccttgatcagagagctttggccctgtcactgaagctagaaggtgggctctcttttgatgggggaaggcgtctgaaattagatgccgatcggcaggttcagtttgccgattttttcagtttatcgcggtgggagcggatggagatcgcacagttgttgggtttgaaacgcagtaccacgatgatgcgtattggttctccttcccctaaagagaatgaacgctttggcacttctgttagcctgaatgcagcgggagattgcttactggttgggatggggaaagagctctatttgtatatgagccggataggtgagttggatacacgcgctcccattgtgtttgaa

SEQ ID NO: 5604 - DNA, 743 bp, Photorhabdus luminescens
  misc_feature (488)..(488): n is a, c, g, or t
tacgggtggtatcgaacacaaccgttaccgccttgccaatcactgtttcaatgctctttgctgcatccgcaaaggatttaaccccatcaagattgattgcggcgtttattgctgtaccattgatattgagtttcaatgtaccggacattttttgcagatcggtaatagctacctcattaaaagaacctgaacgtaaccaggccgatactgccgctcgattaaatcgggaaaacagcaattgaccgggcgtctttgtacaattgttgtaccctgaaaaataaatagccgccatgctatattcttcggatgcaccaccgaaatatgccgccacatcctctttagtcgagaacgacaacaccacaccaacaggtgcatatatattatctgtcagtaataatccattgagatcaacagcattacccactgccgacagcacccccggattaattctcacgtctttactgattggaattgccatgaatagactncactgttttagtgttcagcgtaatactgtcaaaaaatagttgttctgttgtcacaacagggttgatttgagcagtaaattcaaatgtccaacgcgactcatattgctgttcaccattaatcatcgtcgtctgaatcgggtcgctggcataaagtggtgccatatcgatacctgatctcttgaatagctcaatcgcatattcagtgcgcaccgtcggtgcaataatgtgagcatcctcatgagcgaactgaccgta

SEQ ID NO: 5605 - DNA, 659 bp, Photorhabdus luminescens
  misc_feature (563)..(563): n is a, c, g, or t
  misc_feature (599)..(599): n is a, c, g, or t
cgacttgattgataagtggactcctccggaaggttggttttccgatatcggtgcagcgaaagggaaagaatatctgatagactttttccgtaactgtagaggctttcgcactcactaatgacaggggcatcagcccctttcttctttaatcccctttaatatttccgtttccatacatggatgatactgaatgaaacttacagaggagtatcatcatgtcaaccacgacttaccatcttcaatttccctataccacggctgctggcgttcgcattgaagagcttcagttatcacgtttgaaagttaaagatatcaaggctgcccggcgagccagcgaaaatcctactgactgggatgatattttgatagcacgttcgacaggattgttaccagaagatatcgaacagatggatgttgctgattatctggcattacagaaacgatttcagcaagttatcggattggatcagggaaataaaaacagtgtggcaagcatcggcgatgttggcacgatggtttcggttccagccgagcgagattgataatctggcgctggatgaatntgaatgttggttgaatgaggccaacacccaaatcanacgcgagaatggaggccggtaattcgtgtcaccagattttccattggtgtattattgggg

SEQ ID NO: 5606 - DNA, 769 bp, Photorhabdus luminescens
  misc_feature (693)..(693): n is a, c, g, or t
  misc_feature (769)..(769): n is a, c, g, or t
ttgtaatacaaccgcatggcccaaatgcaaatcaggtgcagtcggatcaaagcctaattttattgtcagttttctattttcttgtcttgcaagagcaagtttatcctgtaaccctaagggtggctccataattgcgatgtttgaaagcaacttatcaatattctctttcatataggtaacctaaataattacgtttattaacgatgaataaaacaactttataccatgtttataacaatctctattgtcaagtaaataattattcattctggtcttgttgcattaacgacgatgtagtatgcaaaaatatgtcgtttgttttttaattaggtcgtcttgtcctctttcgtgatgcaaacgaaaatgcggagcacatcgcatttcaatggaacgccaaacttccgcattcaacccccatccgtgcagcaacacaagatcacgcgaaccttcatcagaagtctgccaaaacagatcagccattgttattctcaactttatttgccatcaaggaagaagtctatgctaacaatggttgggtactgttggctatgccatcagcctctttggtttccacatcatggagtatgcagcttttgcaacaagcggctgaaacgtttggcaaacatgtgcccgtgctgtgctctaccctcagaactcccgtcactgccttgtgggcgctgcctcaaaaaccgnctctatgggagatatgatagcgattaccgactattgcccaccactgagtggcctgatccgtcgctataaatatcan

SEQ ID NO: 5607 - DNA, 679 bp, Photorhabdus luminescens
tgcccggcagagttatcttcggtgccggtaaaatcgctgaaacaaaagcggaggcgcaattgctggggatcactcgggctctggtgatctcaacgccacagcagcttaatctggcaactgatgtgcagtcgatattaggcgatattgctgctggtatttatgataaagccgtcatgcatgtcccagcagaaacagtagcggatgtcatgcgcgttgtggacgagttgcgcgttgacggttgcgtggcaattggtggcggctcgacagtcggattggcaaaggcgatagccctgcaaaccgcactaccgattctgacgatccctacgacttatgctggctcagaaatgacgccggtctggggtataacccgggacgggattaaaaccaccgggcgcgatgtgaatgtattgccaaagaccgtgatttatgatcctcaattgaccctcagcctgccagcttttatctccggtcccagcggcatgaatgcgattgcccactgagtggaaggattgtattcacagaatcacaatccgatcacatccatgatggcggaagaagggatcagggcattgcgcttaagcctgcctgaagttgtgatacgcccagaaaatatcaatgcacgtgcgcaggcattgtatggagcatggctgtccggcatcgtactgggttctgtagggaa

SEQ ID NO: 5608 - DNA, 758 bp, Photorhabdus luminescens
aagcttgttgacgcagtaattcggtatttacattatttgtcatgatttttttctcctaaagacacttgtgtgaggggttttcgccggtagaaagtggctagctgctggcataaccaactcaatccagcacaaacagtcattacaagggccatagcaaaaggggtttcatcttgtagtaaagagacggcaacactggcgaatgccgccatagcaaattgtgcggaaatagcgagcgcactggcgctgccggcaagttgaccgcgatgttgaagtaataaagagaggctgttagtaccaatggcattaaccagcgagataaacagtacgaccaaaatgacgatcaccgtcagactttgctgataaaagataaccaataagatgccgaacagtaattgagcactggtttggataaataacagacgggaaacatcgtagacttttagtaaacggacattgagcagcactactgccatcatgcctagcgcattacaggcgaacagtaagccgtagtaattcgccggaacctgaaaatagttgatatagacgaaaggggaaccactgataaatgcgaacatggcggcacaagtgaatgccaatgtgccgatagttgccatagcttcaccgtcagtcagtaacttgccgtaatttttaaacgcagtgataagtttttcgccgttatgctgggcgggtagcgtttctggcagaaaaatagtaataatattccactgatacaaccgaacaggcccaatagcgtaaat

SEQ ID NO: 5609 - DNA, 807 bp, Photorhabdus luminescens
  misc_feature (11)..(11): n is a, c, g, or t
  misc_feature (16)..(17): n is a, c, g, or t
  misc_feature (25)..(25): n is a, c, g, or t
  misc_feature (35)..(36): n is a, c, g, or t
  misc_feature (53)..(53): n is a, c, g, or t
agactgaagtnaatgnngctggcanctgggctggnnaaactgtgttcttttgngagcggataacaatttcacacatggaaacagctatgaccatgattacgccaagctatttaggtgacactatagaatactcaagcttacagcttcacggatcttgtggccgagaaaattcgttcagtgatccagcagattgtccgtaaccgttcacgtcgtcaggacatctacgacctcaatctgcttttagacagcatccaacctgaaaacaaggacaaattggctatactgaccacactactggaaaaatccaccggtcgcttggaagacggaatggtcaaccccgaaaccctgggcagagtggatatacgtgaacgatcctcacgggaatatgaactcctgaaagacgaggtcgaaggggaacttatggactttgataccgcctatacacgtattgtggatttctataaatccctgccttgggacttagtaacaggttggcagaatgttgcaaaatagcctgtatctgtgtcatcaggggcaacgagacgagcagctggatagatttttctttatcaacactggtgtatgttcggtctccgtgatggcagatggattcagccactgccatgccagtccgcattatgttgactggctgggtgaacaactttatgcactggaaaataccggaagttgctgccacgagctgtgcggagaagtcctccggatcctgagctggaatgactgttatcccgggaaaggctagtattgccgttatcgtgtctgatcaagacaataccggtatgccctctg

SEQ ID NO: 5610 - DNA, 767 bp, Photorhabdus luminescens
  misc_feature (686)..(686): n is a, c, g, or t
  misc_feature (726)..(726): n is a, c, g, or t
taaatagaccggtggtaaggcagaaatgccacagataaatacccgtttcggtaaacaagctgaaaaatcagtactattttcctgttcagtattattttccagtatcgaaataaaacgctgatacaaattagcacgatgccattgaggttgttgtaactggtgagtatatttcgtcagttccagccataatcttttctgccacaactgattatcactcaaaccatcaataagctgaccttgctgccaactttccaaccattgcgggcgataaacgagatattggtcaaacagatcagcaacccgtccagctaattgatgaatcttccgtttatcaaaatcttgatcaaggtagtgcctgagtccaacaaactctgcttcaggcagcaattgaggcaataacgccatcaatttccatgtcatagcatctttactaaaagcactttctttaggaatatcaggcaatactttggtaaacatatcccaaataaacgtagcgggaagcggaaatgaaatattagctgatatgcctattctttcggccagttggatttgcagccactgtgacatacctgggctttgtaccaaaatgacttcctgcgcaaatggatcagtcagtgggttacccccgatcaatattgctatcaattccttaagaagatctaattgattagaatgataaaccttanacatcggaactcccatttgaacaaatcaatcggcttgctntactttgctgatataaggcgtcatcactataactgtaagca

SEQ ID NO: 5611 - DNA, 689 bp, Photorhabdus luminescens
tgccagtgtttcggtgacatatctaccgttttcttgattcaattcgccagcgattgcgggcacatgaagaggaactggcagtattgtcaatgtcccggcagcctgtggctcgggggttttgtcagcagaatattcttgtagttgcaaaggtaaattaagttgtctggctctgtcgagaagcaggttggggtctgcgcaagcgaccaattgcattggccaactttgttgagcaagagccactgttaaatcaggcccaaccccggcaggctcgccgggggtaataacaattggtttattgataataatcggtttattgttgtgcatcgttgccatctaaaattttcacataagctgaggcgcgttgttcctgcatccagctttgtgcttcttcggtgaatttacggttgaacaacatacggtaagcacgatctttctgagcgacatctgttttatcaactttgcgagtgtccagtagttggatcagatgccaaccaaaagatgagtgaactggctgactgatttcacctttgttcagtcgcattaatgcgtcacggaaagcaggatcgtagatatcaggagccgtccagccgagatcaccaccacgcagggcggagcctggatcgtctgaaaactctttggcggcatcggcaaaatcagtttttccactgccaatgtcactggcgatttga

SEQ ID NO: 5612 - DNA, 779 bp, Photorhabdus luminescens
atttatgcctctggtgatttaattgatgagcagagttcactcaatgacggcgctaaacaagcattcattaatcagcgtctgcgccagctcagccaattgcaagcggatgaaaatattgagatccatgcaggaaagattgtcgatctgagaagcatttccttgacggcggggaaagatatcacgctgaccagtggcggcacgcttgatgtgagtaaaatcacagcagaggacccctatgaatatgaagatgaacacggaacgggttatgaaaagcattatgaatatgaaaatgctgatgacgaggaagacgaacaatcttacccacaatttcaattacccatagcgagcagtatcatcactgccggcaataatttaacccttaatgctggtggtgacattattgatactgaggcaactttgtcggcaaaaggggtgactgccattgtcaaaaacaacgcagagttacattcaccgtcagggaggtataactcagttgaagggaaatatacgccagtcacttctgcgctgattgcatgtgcgttaagccatgctcctcaactgaccataaacgcctcagaagtagaaggagaagtcccagggattaaacctggcggattagcaaactccgatcacctcgaaaaacaatcaccctattattcatattgcggcacctaacgcccgtgggtgttcacataacccgtatcaagagtttaatggtggggctttccgggctggtgctcaataatgctaccgaagctacccaatccgtactggcggga

SEQ ID NO: 5613 - DNA, 681 bp, Photorhabdus luminescens
catgggtacgaatagtgatttttgtaatgtcattgatagtcttaccggcgtctttcaattgttgatgcagactgatcgccgcttccaccgcagtttgcgcatgaaattctgccgggaaagcgatcttgaacagcacgttttccatcacataagcgccataggcacgctggaatttaaaaggctgaccattgaacaggacatcatagaatccccacgtttttgcagttaataccgagggatatcccatttcacccttttgcgccatcaaagccaagcgaaccgcgcgggatgttgcatcaccggcagcccaagatttacgtgagccagtattgggagcatgacggtaagttcgcaatgattgaccatcaacccaagctagcgataccgcgctcaagatctcttcccgattcaatcccaacatttcagcaacaacagcggtcgaagccacttttaccagcacgacatgatctaaaccgactttattgaatgcattctccagtgcaagacatccctgaattttatgcgctctaccattcccgtcaaaacatctttgatcgtaagccggttctttccaccagcaacggcatttcttgatagccagtcagccactgcttagatgccaccgaggttatcggatggatgcccccttcagcggcaaccatgtgtattaaaatctacccg

SEQ ID NO: 5614 - DNA, 760 bp, Photorhabdus luminescens
  misc_feature (500)..(500): n is a, c, g, or t
  misc_feature (512)..(512): n is a, c, g, or t
  misc_feature (616)..(616): n is a, c, g, or t
  misc_feature (654)..(654): n is a, c, g, or t
  misc_feature (662)..(662): n is a, c, g, or t
  misc_feature (753)..(753): n is a, c, g, or t
  misc_feature (760)..(760): n is a, c, g, or t
cctctgctaccacctgatgttgctgctgtcatggccgcgaccgcagaacacttgtttccgctgctgctgattgtcggattagcaacacgcttctccgcgctagcattaatggtgatgacgctggtgattcagatatttgtttatccagatgcctggcctgtccatgctacctggctgacggctcagttgtatctgatgacttatggcggtgggaggttttcgcttgatcgcctgatttaccgccatcgtacctgattccccttccctacgttactttattttgattctcgttttcgccacgagcgaatgcggaagtcatagtgcgcaggtcggcaagctgttgtctgaagtttcggcacccgtcgcatattttcaaatgcagcattagctgaacatgttgagaaagcacgattttttcatccagcgcctgagacatcaggcgtgtagcttggtaacaactaagcatatttatcctcatgggaaaaccagcgttgtgacanacattcacgtanacgcatacgcgcacgccagagcatcacattcagattgctgacagagagcgccatctcctgacagatctcctgagtctcaagaccaataaattcgcgcatcatanatgcccgcgcgttttgcgttggcaactgtgtcagacanagctcganaatcgtccaaaattgctcctgctcggccacttcatccggtaaatgccagcactgcggatgctcgtttcgcggccatgaccagactcatcanacagcgn

SEQ ID NO: 5615 - DNA, 680 bp, Photorhabdus luminescens
tggcacatttttcattgaatttccccatagaaccggaagtatctacacaaataataaatggtccttgaggtttttcttcctggctataatgagtgactggctgtaatgttgttttttctcgccagttatcaccttgtaagcgataggtcaggagttttttttccactaatttgcgataaaactcatattccagatcttcaattcctaatattgctaattctattggtaataggcgcagaatatcatcactttgtccgataccatttacctgttcaggaatgatgtcgggtgttcgctcgattgtagtaactggttcgaaaaaatggttttcttgtggttttgattttacagattggctgcgtccaagtaattgagctaattttttcagttccggctgttggtgaagaaattcactatagtggatcaataactgcttatcattttgagaatgatttaactgacttttgctcatatcccataatcgccccgctgccctatcattttcactaaaaacaggatcaagattaccgcttagtgtcagcttttgttgcagttctgccagtaattgctctttttcttgctccagcaattgcttatggaaggttgtagtttgcaggatcaaactgatcctccatcgctgaataaatagggtttgtagtgtatttgaatcaccaatgggg

SEQ ID NO: 5616 - DNA, 777 bp, Photorhabdus luminescens
  misc_feature (198)..(198): n is a, c, g, or t
agctttgacgcctttatatcatatatggaaaacagcaatgatatttgggctataaaagacaacgaacatcgattcatctatgccaatgatacaatgatttattacagcggccttcctaaaggttttaatatagaagggaggcttgatggtgagtgtccagcaccgtggtctgagtttgaaaatattatacaagctagntgtgatgttgtaatgacgagtcaaaaaaccattccagtattaaacaccttgacttatggtgggaaacaaaaaatgatccaaccatttatgctcaatgttacccccctaatgaaggatgggaaatgcattggggttgttggtcaccgtaaaaaacttgaaatttattccatgtatcattttgaaaacaacattcagcctgactcattaactttttggccaaccacctgatttatttactgatagagagttcgatatagtattttttgccttacatcccctaagcgctaaagattttgccagaaaattaagtcttatcctatagaacggtgcaaagcaggctacatatcattgatcagatatacgggataatggattaccccccgtaaaagaatattgccgggccaaggggtatgataactacactcctaccggatttattaccacgaatgcctatgtacccgtacggtaaccaatgaaccaccccggtatccggactatgctcttatgggcgctgcttgacacaaccttacgcgctggggtttccactgcttcctcgtatgcgcttcccatcgtgcataa

SEQ ID NO: 5617 - DNA, 647 bp, Photorhabdus luminescens
  misc_feature (130)..(130): n is a, c, g, or t
ctatgacacaacgagctggtcgggcaggacggttagaagccggtgtgtgttggcatctattcagccaagaacaggcagaaagagcggtagagcatagtgagcccgaaattctgaatgctgatctcagtancttatggctctccttattgcagtgggggtgtcatgatatttctcaattgcactggctagatataccacctgcggcggctctggcggtggctaagtcgctgttattacagttaggtgcaatcagtaacagtggtcagttaacgttcagaggcagtaaaatggcggaatccggtagtgatccgcgtctggcaacgatgtatgtgcggggttgaaccaggtgccgatatgctggaaccgccgcttgctgaccgccattttggagacccccccgtgatgctcaaccgacatcacttattgggctggcaccgaaagcttattggttcggcggtcaatcatttgtatgaacttggtgatcattttgtaaccagtctgtgattttgttcacgctttacccaaggtttgcctccatactatcaaattccgatacgggtgcttttcactttcaatggccgctaacatctctatataataactttcctcccacctgtctggtagccctttcccttcaaacctgatac

SEQ ID NO: 5618 - DNA, 830 bp, Photorhabdus luminescens
  misc_feature (1)..(1): n is a, c, g, or t
ntcgtcaggcactgtacctggggactctctagagtaaacctgcctgcatgcaagcttgtggcagtggtgcttgtgcagcggtagcagtaggtattcagcagcaattgctcgacaaccatgttcgggtagatttgccgggaggttcactgtttatctgttgggatgggccgggaaaaccgctctatatgacgggaccggcgatgcacgtttatgatggcacaattcatctgtaatcgattctgttttgagctgcggggcatcggagatggagaaaaaagaagagcagttaagcatcaatgacatacttgatgatcagactgttgtggattatttattggaaaaccccaatttctttatccgtaatgcatgtgtcgttgaacagatgcgggttcctcacccggtgagagaaacgatttctttggttgaatggtatatgagccgccagagaacgcgtattgcttatctggaagaagatataactctgctcatggaacaggcgagagtgaacgaacaactgcccgagcagttgcttaaattacttgttaatttggttgcggcagacagtttgcaagatatgcttagtcggttaagtttatgggctagaatatggcactaaataccgcccatcttcctcttttgactgataaatggcatattgggcgcaccattcgatgcgcctgattcatcgcttgcttgcactgctttcgacccacgcctatttcgtcctgttggtaatcaaaaccactttcctcggcgtgcctaaatgggccggtaattctattgtccgtgccccaagctccgcatgtttgctccgttcgccgccttttatt

SEQ ID NO: 5619 - DNA, 774 bp, Photorhabdus luminescens
  misc_feature (608)..(608): n is a, c, g, or t
  misc_feature (628)..(628): n is a, c, g, or t
  misc_feature (676)..(676): n is a, c, g, or t
aagcttgtgcaaaggcttatgactcatcgttgcatgaagcaccgattgtgattgggcatccaaaagacaatttgcccgcctatggttgggttaaatcgctgacatcttccggtgatgacttgattgcggagcctcaacaggttgatgttcagttcgctgaattggtcgatgcaggccgctataaaaaaatttctgcttctttctatttacctgattccccaaacaaccctaaacccggcgtgctctatttgcgtcatgtcggctttttgggggcgaagccacccgccattaaaggattgagacaggttgaattcagtgaacaagaatatggtgtcgtcgagttctctgattggagtgatatcaccaacgcttcactttgggggcgtttgcgagaatttttgattagtaaattccgtatggacgaagcagacaaagcgcttccttcttggcaggtagattcattacgtgaagaagcttatagcacgactcagcctgctcctgcctttcatgaacccataacacacatcaacatgaggaaaacatcgtgacatatgaagacaaaaaggcgctcacagatgaaaacactcgcctgaaagacagcttactgnccgtgatgctgccgacgcanagcgcatacaaactgagcaacatgccgggaacgtggcatttgccgaanagctgatcacagacggcacattggcgccagctgctcattctatcgtgatcgccttgctggacgctgtaacccaaggagattcccctgtcgagtttgct

SEQ ID NO: 5620 - DNA, 685 bp, Photorhabdus luminescens
tatggatttcaagatgcatcgcaacggcaagggagtgaatccccggtcacatagttaactatgtgaccggagtgagcgagtgcagccaacaaagaagcaacttgaaagataacgggtataaaggttttcaatctcatcaaggtctattattatcaacaccctgactcctaaaggaatgtaattaccatgcgctgtaaaatgttgactgccgctgctgtatcatttgtcatgctgactgcgggttgctctacgttggaacgggctgtttatcgccctgacattaatcaggggaactacctaacaccgacgagtgtatcaaaaatccacaaaggaatgacccagcaacaggtagcttacacattaggaacacccatgttacaagacccgtttgggactcagacgtggttttatgtatttcgtcagccacctgggcacgataaagtgactcagcaaactctgaccctgacatttgacagtaatggtgtactgactgacattaaaaacgaaaattcacttaccgaagatcttcaataaccgaagaaatatagacagtcagtcaaaaaaatagatgactgaccttctatagtaattattgaacattatttttagcccgctcagcacgcttacgacgcatttcttgtggatcagcccatattgggcggtaaattcccaccctatcactctt

SEQ ID NO: 5621 - DNA, 762 bp, Photorhabdus luminescens
  misc_feature (521)..(521): n is a, c, g, or t
cctttttcgccccaatgttcgcacattgggattgataaatagcttgtttccctctttcaataaattaaattttgcattttcaaatatagcggaatttttctgctctaccttgacatcattccccaacgatttcagattaatgcctgaaatccgcggcactcttctgacacgctcacctgaactgttcgacgttggtatcaccctatcgtcagattgtcctttggcaaactttgaagtcgttaaaacgccggtattttccacgcgaatactggcatttatctgtagacgatcaaccgcttgtttagcatcatccaacgcttgtagctcttcttcggtcaatcctttgtagaattttttttcagcttccggtattaattcgggatcaatatagctaccggtttcccccgcgcctgtcgattcatagccattaccagacaaaccactaccaccggcaccggtacgatcaggttttgaatcgctctgttttgcccctctaacatcttcttgtacctgggcaattntattttcagccgcagcactatcacgtttaccccgatattccgccccctgataggcgatatttgcatcattttccgccctttcggcccgttgttgttgcaataatgcttcttcttttcttaatcctgcttttttctgagccgctgcaatatcttggtttgcactggcatgatgccgttcactttgtgctacgccgacctcggatttcttcaccgattctttacgcgctgcggccatacggaa

SEQ ID NO: 5622 - DNA, 673 bp, Photorhabdus luminescens
  misc_feature (451)..(451): n is a, c, g, or t
tactgtccgcgggaagctggatgttcaaaataaccgctgtattcgtcaggtacagtggttttttgtttgatcaatttgtttgatcaaatagcactgagcgcaggcccttccttcagataggggataagtagttatcggagtgtgtaaacttgacgttaaacactccgaattttttgacattaagtggatgtcccgccgtaaccgaatagcggctggcgtagccagagggcggggagataccctcttgtatgatttaaagggatttttgatgggaaaagcatctaatagaagtgcagtgtacctctttacaggaagatattacgacgataatggcggtaatcgtattactgctgttggggctggtggtgaagtttatgcttatggcggaaatgatgatgttaccgttggttcatttaaagtcgatgtataccatacagatggcgaccttacngtaaagggagtgtcaggttataccggtattcataaaacgggaaatggcgggctgtcatttacggaggctgccggtgtagctgctattatcacacgggtgaaacgggaaatttaattattcgggtgcggccggctatataaactgcgccgtaagggttgctggtgatactcttttagaggcgcccgtggatacattcactatggcatgaaataaccgggatat

SEQ ID NO: 5623 - DNA, 760 bp, Photorhabdus luminescens
  misc_feature (635)..(635): n is a, c, g, or t
  misc_feature (704)..(704): n is a, c, g, or t
tgttattcaggctaccgagcgacagttaaaatcgcctccggccactgcggttagcgtgactgacatgctttccttacccttaatcgccttaggtgctggcgcttcgctggccgggggtatcgactatctctcgttggcatggcaaaacggtctggataatcttgatgactttacccccggacagaccctacaagctcggggggatacatgaaaatacccacagtaaccctcaaaataggtggtaagacactcaaccaattcaccgtaatcagcttgacaaccaaccatcacatcaatggtatcccttcggccaacatcactctgggtatcgccggtgatgccaaccctatttttgacaccaagacacaggctgaattggcaagctgccgcccgaaccatgaagttatcgtacaaatgcaaaaaaccgtgttatttaaggggatcatcgttcggcagacactggggcttaaaggtcaggacagcatcattaccctgacagcaaaacatcacctgcaaaaattaacccatagctttcactcacagctattcaataaacagagtgatgaagcaattatcaaaaaactcttcaatcagaatggcatccaaacgacgataaagcaggcaccacaactcanaaccgttcatgaacaaatggtgcaatttcgttgtaatgactgggcatttctaaaaagccgattgaccgncactaacacctggctgttgcccggcaatgaatcggttaccttgataacacccaagg

SEQ ID NO: 5624 - DNA, 678 bp, Photorhabdus luminescens
  misc_feature (633)..(633): n is a, c, g, or t
attgtaagatccaaggattatggcgaaatcccggtgatgaaccggtatttaccagtagtcttgaactggacatgtcgacggtggaagcgagcctcgctggaccgaaacgtccacaagacagggtggctttagcgcgagtacctcaagtatttcaatcatccgttgatctagaaatgaataaatcccaggggaaagccatctcagcgccagttaatctggataaccagaagtatgagttagaagagggggctgttgtcattgctgcaattacttcttgtaccaacacatctaatcccagcgtactaatggctgcggggttgttggcgaaaaaagcggttgagaaggggcttaaacgccaaccgtgggtgaaaacctcactggcgcccggctcgaaagtggtgacagattaccttgaattggcgggcttgatgccttatctggaggaactgggcttcaatctggtgggttacggttgcacaacttgcattggtaactctgggccattacctgaatctattgaaacggcgattaagcaagctgatcttaccgtcggtgccgtcctttctggcaaccgaaactttgaaggccgtatccatcctctgataaaaactaactggctagcgtcgccgccgntagttgtggcatatgctttatccggcaacatgaaaaaggatttga

SEQ ID NO: 5625 - DNA, 750 bp, Photorhabdus luminescens
  misc_feature (625)..(625): n is a, c, g, or t
  misc_feature (637)..(637): n is a, c, g, or t
  misc_feature (750)..(750): n is a, c, g, or t
cataaccaccaattcactacgggttgccagcgtaccaagccccagtaaggcaccaagcaaagctgccatcgggaagaatatctgaatatctttcggcacacttaacaaaacataaagaccagcagaaatagtagtatattccccctgccccacttttcttaactgctcgacaaacttaataataccggagagtgataccagcataaacagcgtcatcagaatagtctgtagaatagtccgcccgatataacgatccaatacaccaaacatcaggctactcctctgccgttgaaacgagcccggatcctacgcaccggcaacgtatcccaaatattgagaaccagcgccaacatcagataagtcccattagtcagccacatccaaatcatcgggtccaatttgcctttactaccgttagaacgcagggagctttgcaataagaagaaaatcagataaagcaacattgcgggcaacatgcttaatacccgcccttgacgtgggttcaccacacttaacggtacaaccatcatagccataatcagtaccgagagcaccaaagtcaaacgccaatggaactcagcacgggagtccttatcattatcctgccataactggataatagatntctgttcaactntattattatctacgattgaagtctgatgcccaataatcgcttgataatcacggaactcagtgatcctaaaatcacgcagcattgcagtgccttcataacgcgtaccatgattn

SEQ ID NO: 5626 - DNA, 671 bp, Photorhabdus luminescens
  misc_feature (619)..(619): n is a, c, g, or t
tagaggaagctgaaatccatgaaattctgggtagcttagagaaaaaagttgttcgtagccgcgtcttgcgtggtgaaccacgtattgatggtcgtgaaaaagatatggtgcgtgcattggatgtacgtactggtgttctgcctcgaactcatggctctgcgctgtttacccgtggtgaaactcaggctttggttactgcgactttgggtacagaacgtgatgcacagatcattgacgagttgatgggagagcgcacagatcgtttcctactgcactacaacttcccgccatattctgttggtgaaacaggtatgatgggttcaccaaaacgtcgtgaaattggtcatggtcgtttggccaaacgtggtgtggcggcagttatgccaaaagctaacgaattcccatataccgttcgggtcgtttctgaaatcacggaatcaaacggctcgtctacaatggcatctgtttgtggtgcatctcttgcgttgatggatgcaggtgtgccgattaaagctgctgttgctggtattgcaatgggattagtgaaagaagacgataattttgttgttctgtctgacatcttgggtgatgaagatcatttgggagacatggactttanagtagcgggtagctgtgaaggtatcagcgccctgcaaatggacatcaatata

SEQ ID NO: 5627 - DNA, 757 bp, Photorhabdus luminescens
cagagaagtattcacaggttgcagcaaccggcgatgggccggatattattttctgggctcatgatcgctttggcggctatgcacagtctggtctggtgacagaaatcacgccagatccgagcttcaaagataagctatttccgtttacctgggatgctgtgcgttacgacggtaaactggttggttaccctatcgcggttgaagccctctctcttatctacaataaagacttggtgaagacaccaccaaaaacgtgggaagagatcccggctctggataaggcgctgaagagtaaaggcaaaagtgccattatgtttaatctgcaagagccatatttctcttggccgttgattgctgcggacggaggatatgctttcaagctggaaaatggcgcatatgatgtgaagaatgccggagtgaataatacgggtgccaaatcaggcctgcgtttcattatcgatttggtgagaaataagcatctaaatatagatactgactattccattgctgaggcggcgttcaacaaaggtgaaacggcgatgaccatcaacggtccgtgggcgtgggccaacatcgacaagagcaaggtaaattacggtgtggcattgttgccgacctttaacggtcatccgtccaagccgtttgttggtgtattgacggcaggtatcaatactgccagcccgataaagagctagccaaagagttcttggaaaactacttgctgaccaacgaaggtctggagatggtgaataagata

SEQ ID NO: 5628 - DNA, 681 bp, Photorhabdus luminescens
atgatagcgcattcaaaacagatccaacctccgctttcggcggtattattgctttcaaccgcgaacttgatattaaaactgcacaagccattatcgaccgtcaattcgtcgaggtaattattgccccctcagtaaataaagatgtcttacctgtgctggcaaccaagcaaaatatccgcgttctggtatgtggtgaatgggaggaccgggctgctggccttgattttaaacgagttaatggtggcttactggtacaagatcgcgatcttggtatggttgcagtaactaacctacgtgtggtttccaaacgtcatcccaccgaacaagaaatgaaagatgctctgttctgctggaaggtcgctaagtttgtcaaatctaatgccattgtttatgcaaaaaatgatatgaccattggtattggtgctggccaaatgagccgtgtctattccgcaaaaattgcggggattaaagcagccgatgaaggcttggaagtccaaggatgcgcaatggcgtctgacgcctttttcccatttcgtgacggcattgatgccgctgcggctgtcggcgtaagttgcattatccaacccggcggttcaatccgtgacgacgaagtaattaccgcggctgatgaacacggtattgctatgattttcaccggcatgcgccattttcgccactaaa

SEQ ID NO: 5629 - DNA, 766 bp, Photorhabdus luminescens
  misc_feature (516)..(516): n is a, c, g, or t
attgcggccatgacgggcaaacaactctctgcccaccaactgctccaaacgttgcatttgctgacttacagccgattgcgttctgcatactgctgctgctgctgctgcaaaagtatttaaatcagcaacagcaacaaaagttcttagcagatcgagatcgagattcattatcggacgatttgcatttatcattgtttattcatcacttttttttgattttaattactaactaacctggtgtttttacgtaagcactatcaaattaaattaacatcacttagacagtactctactctattaaatagggcaaagatttactgctgtttttttacctattgaacccattgtgggttttattttctcctcttcttagcaaaagttactcggattcctaaataaattgaggacaatccctatttacaacaccctatatgtaatttctagtttggttattttgttttctgactcacgtcaaagaataacataagttatatcagaaaaactaaatataaagtnaaaatctacaatatcactaatgtttaataatcctattcagataaatttacaactagtttccagaaatgatcaaaaatattgtttgatctttctaaaatatatagttctgaattgccaactcaagccaaatcttatacataagaataaattatacaaacacaacaatttttattggcaaattgagctatgctcactttctctccacaatggcacgatcataccgttatcacactaaaaacaccccatttca

SEQ ID NO: 5630 - DNA, 682 bp, Photorhabdus luminescens
  misc_feature (594)..(594): n is a, c, g, or t
  misc_feature (632)..(632): n is a, c, g, or t
cggcattgtttagggcgtcatccgtttgcaaagatagcgctgttttctcattgccttgcaccaaaatgtcgattgttgtgatgcgtgttgccagtgtcttgatataactgacaaatgcctgttgctcgcttttgtcgaggcgactgatgccgaccggtctgtcattactgtagcgccaataagcgttgctctccagcgcacgttccagcattttctgttgctggaacaattcgggactccactcgcgaccattttcacggaaccccttcttgatctcttggaccagcgtttggattttcggtttgctcctcatctctctaaaggtcgcttgtgcagacgcgagcagtgattgatagttgttactgggaataatggttctccttaggaaaatcctactttgatatttacggattacaacgcttcaagaatggctggctatggcggacacggctagccgtctgtgatctaagaatctttcatctgcaaggtccacagtcgggcataaagcccgttcaaggcgagtagttgctcgtggctgccctgttcgaccacctgaccttggtcgattaccagaattcgatgggcatggcgcanggtattaaggcgatgggcgacgctgatcactgtgcggncctgtgcaatgcgttgtaggttggtcatgactgccgcttccgactcgtag

SEQ ID NO: 5631 - DNA, 774 bp, Photorhabdus luminescens
  misc_feature (7)..(7): n is a, c, g, or t
  misc_feature (12)..(12): n is a, c, g, or t
  misc_feature (16)..(16): n is a, c, g, or t
  misc_feature (63)..(63): n is a, c, g, or t
  misc_feature (67)..(67): n is a, c, g, or t
  misc_feature (125)..(125): n is a, c, g, or t
  misc_feature (151)..(151): n is a, c, g, or t
  misc_feature (153)..(153): n is a, c, g, or t
aagcttngattntctncatatagtgactgaacttacctactgcctgtgaatttttcacatgtncggnaagcctgtaatcatcagcgtgatcttcatcatatgggccatgttcatacatagttagngagaaaataaagagcggcttatccgntncctgtgccaaaatttctttcacataacccaacatatatcgggtagaaatagtccacagatttttatcaaaactggcgggatatcccaattcttgcggctgaataatgcgatcaacgccgacagtctgataggcatgaccggaatgataagaagatttattaaatcggtgtcgaacaaccgtatagtcaccattctgtttcatttcacggaacacgctatatttcaggtgatcaacaataaaataaaaaaccgcattcttacgtgagcctcaatcatctgtctatacgcccgacagatctgaatatgcatataaccaagtaccaccaccgaaagtttgcgcccgcattggactttgggcgctgacacacgaatcccgctggaacatataaagatgaggtaagcgggatcatcaagcagttgatagatttgcggagtcacggtggattcctgtaacacatcaccacgtcaggtttaactcgtgacttgcgtacacgcaggacatcattcttagcctgttgcagaaaataatcggatgactgcccaaaccgacgcgcatgataatttgcatcttcggcccacatcactatatcgttgactgtaccacgtccttttggtagcgaa

SEQ ID NO: 5632 - DNA, 683 bp, Photorhabdus luminescens
  misc_feature (2)..(2): n is a, c, g, or t
  misc_feature (25)..(25): n is a, c, g, or t
  misc_feature (31)..(31): n is a, c, g, or t
  misc_feature (41)..(43): n is a, c, g, or t
  misc_feature (48)..(48): n is a, c, g, or t
  misc_feature (53)..(53): n is a, c, g, or t
  misc_feature (65)..(65): n is a, c, g, or t
  misc_feature (105)..(105): n is a, c, g, or t
  misc_feature (120)..(120): n is a, c, g, or t
  misc_feature (127)..(127): n is a, c, g, or t
  misc_feature (135)..(135): n is a, c, g, or t
  misc_feature (146)..(146): n is a, c, g, or t
  misc_feature (165)..(165): n is a, c, g, or t
  misc_feature (171)..(171): n is a, c, g, or t
  misc_feature (178)..(178): n is a, c, g, or t
  misc_feature (217)..(217): n is a, c, g, or t
  misc_feature (223)..(223): n is a, c, g, or t
  misc_feature (251)..(251): n is a, c, g, or t
  misc_feature (255)..(255): n is a, c, g, or t
  misc_feature (271)..(271): n is a, c, g, or t
  misc_feature (363)..(363): n is a, c, g, or t
tncagccgaaggggcgattatccantatgcnaatgggattnnngattntcagnctgaacactgtntcggctgtggctactgtatcgcgggttgtccgttcaatgngccacggatcaacanagaaganaaccgggnatataagtgcnctctgtgtgttgaccgcgntaacgncggtcangaacctgcctgtgtgaaaacctgtccgaccggtgcaatncatttnggcagtaaaaaagcgatgaaagatttgncggntgaacgggtgagtganttgaaaggccgaggttatgacaacgcgggcctgtacgatcctgatggggatggtgggactcatgtgatgtatgtgcctccccaggctaacanaccacagctttatcattgcttaccggacaatcccgctctcagcccgaccgtcaccttccggaaaggtatctggaagccgctggccgcagtgggatttcctgccacattctctgccagccttttgcactctgtgggaattggaccccaccctgtgactgaatacgacgaggaaaatgcgcgtcttgatacggaatctcccctgaatccgctactggggaggaacatctttgaacagctggaacgatcttattaggctcccctcatctgtgtagcgaataacccattggccggagtgctgtgtcttctctaccgccatagag

SEQ ID NO: 5633 - DNA, 774 bp, Photorhabdus luminescens
aagctttttaaaagggggatatatagtgatatcaagttcaacaacctggtttctcgatatgcagttccctgaacggcttaccacattacgcaaggaacgcgggctcactcagcaggcgctggctgatatggctggtgtggcagttttacagatccggcgttatgagggaggctcagcacaacctaccttagaggtaatacgtcgcttggctatttcgctcggtgtcagtgcggatatgctggtttttgatgaacaggagcgcggtcctagtgagcggctgcgctatcaatttgaggcaatttctcgtatgccgcagtatgagcaggaggttattaaggagttgctggatgcaatgatcatcaaaactcagattgccggcacaatggcctgtatttcaacaacagcgaaggaagagagttaacacagcacggcgctgaagtgcgggaacactccagcgccgctaaccatcaccaactatcagaggtagttcatcatggctaaatgcgattctaaagcaaaaccattacaactaaagtgcaggctgtaaagccacggcattacaccgtgggctaccggcctaaccggggcaagcccaatccgtacccgcagctcaccattaaggggcgctggttggctgcgttgggctctaccacagggaagccgatcactattaccagcgaagccgtgccggtaatcattcaactggctgagaatgactgacggctaaaggaagagtccagtcttttagctggaccctttggataccaacaggtg

SEQ ID NO: 5634 - DNA, 670 bp, Photorhabdus luminescens
atcgtattcagacgagtctcaaaatccaggatatccagcgagcacgtcagcaaagcttgcagaaaatggaagagaaccagcagaagattaaagaagctgaaaattctgccaaagaggcgcagaaatctggattgttttctaagatctttggctggattagtgcaattacttcaattgtgatcggcgcgattatggttgctaccggtgttggtgcggtagccggtgctttgctgattgtcggaggagtgatgggggtagtctctcagggactacaacaagcagctcaagatggtttaatcagcaaggaaaccatgaaatggctagggccagtcataacagcgattgagattacgatggcggtggcggcggcggcagtcagtttcggtggttctgctgccggtttgattgccaaatgggcgctaaatgggcagcaagtggctgaatgactgctaagatggcagtaaccgcagcggaattttctgcaaagccgggggacagcagcaaatacacgtttcgggggctgaaagtggctatgcggtgggcaaccgggagttgatgttactaatgcgcctgtcaactaccatgcggccttccgagaaagcggtaaccgaaagctgactgcactttcacgagcgaatgaccgcatccaagccgtttggacaggtcaagg

SEQ ID NO: 5635 - DNA, 763 bp, Photorhabdus luminescens
  misc_feature (458)..(458): n is a, c, g, or t
caagttacacagtagtaaatggtttaatctgtttttctgccacaagagttagttgcaaatattccactataaaaaaccaccacagatgtgatggattggggtgttgagtttttagagttatttactggctattatgtaccggaggaataaccattcattaagattgattaacctttttcttagagtttgtcctgtataatgtttgagtaatctgcgaggtaaaataatcttcatccagaaaacacaatagcctcttaatgtgttttttctcttgtggcattgcaattttccttttgccattatcttcgtgtatatctaaatcaaaaaccactccattttcattagctgctgctaataaagcatccacagtataattctctaagactcttgatttatttattaatgatactttctttcttattaccgtatcagcaagacttgtaaggtcaaaattattngaaatatggaaatgatcatgattagacaactctcttaaatcatcatcagtggcctctttaaaatacccatcaacatcgaatattcgcctcaacctatgaaaactttgaaattttatttattaccctcaagtattgcggttagcttattatccatactcaaaccctcagaatcaaatcccttaaagcatttttggcctgaagtatacctttgaacaatgttccttcactatcccttatctgccttctatcaaaacatcgaacataagcttgtatattatcttctgtctcagatcaaggcattccac

SEQ ID NO: 5636 - DNA, 683 bp, Photorhabdus luminescens
  misc_feature (500)..(500): n is a, c, g, or t
tgcaaaggcttatgactcatcgttgcatgaagcaccgattgtgattgggcatccaaaagacaatttgcccgcctatggttgggttaaatcgctgacatcttccggtgatgacttgattgcggagcctcaacaggttgatgttcagttcgctgaattggtcgatgcaggccgctataaaaaaatttctgcttctttctatttacctgattccccaaacaaccctaaacccggcgtgctctatttgcgtcatgtcggctttttgggggcgaagccacccgccattaaaggattgagacaggttgaattcagtgaacaagaatatggtgtcgtcgagttctctgattggagtgatatcaccaacgcttcactttgcgggcgtttgcgacaattcttgattgagaaattcgggttggacgaagcagacaaagcgcttccttcttggcaggtagattcattacccgaagaagcttatagtacgactcagcctgctcctgcctttnatgaacccatgacccacttcaccatgaggcaaactccttgacaattgatgataataccgcgctcaaagatgaaatccctcgcctgaaagaaccagtttcctgccccggatgctgcccaagcacatcgcatacaaactggccacattccggatacctggattttgctacaaagctgatcacaga

SEQ ID NO: 5637 - DNA, 759 bp, Photorhabdus luminescens
ataattaatttggtatgttgattagtttgtttggaataaatttcggggtgaaaaatggaacggctaaaaaaagtaaagattggttttattgctggtttggcattggttatgagcgcaatggcaccaacggtggcgttagcaatggagtcaaagaccacggtagctcagttgattaatcagcgtctctcttacatgaaagatgtggcaggatacaagtctgaaaatcatttacctgttgaagttttggctcaagaagagaaggttcttgctaaatcaataagtgaggctgaatctttcgggttaaatggggaatcagttagaccattcgttataatccaaatgaatgcggcaaaggcgattcaatatcgctatcgagctgattggttgtcagttcctgaaaatggttggcaactgaagccgctagatgatgttcggattaaaattagcgggttgagtacggaaatcctccaacaaattgcaaccttgctcaaagccggagaaaaaataagcgcttctgacaaagaaatgtttatgaagaatattcaacaacacaatttaaaggattcggataaacagcaaattttcgcggcgcttgaaaggtgaaataaaataaatcacaatccctcgctctttagcaagaaaagccggtctttttgaagtgagcctttggaaatggatttgctttacggtttttcaagctacccagcgcacatacagcaacaatctatttcggcatacagataactctgcccgatatca

SEQ ID NO: 5638 - DNA, 677 bp, Photorhabdus luminescens
  misc_feature (463)..(463): n is a, c, g, or t
  misc_feature (496)..(496): n is a, c, g, or t
  misc_feature (677)..(677): n is a, c, g, or t
atgatcgccgggaaagtgtcattagatacgaggataacccggaagctgtacttgctctctaccgggatccggaaacggtgaagctgttttacagggaacaccacaagtattcctgccactcccaaaattggggagcatcgaagggagtagaccactatcatgatgtatgtgtagtccttaatcccgctaatgtaagagcttggaaaaagggaagttttcgggatatcaatgcggagacacgcaataaactatatgtggcctgctcaagggcaagaggcaatctgacgtttattccggaatctttgctcaaagcttacaagcaatcttgatttgctctggtatcaactcggataattataagaaaggtcagtgataaatgttttttgccggagataaaacctccggcacgttgtagatgaatgactcaaggggctagtgtttcacgttggagaagccactaatncagttctgattcgagccaaccgacggattactntcctagctggcgctgcttagggaatgtattgtcataacgcagtgacttcgggttgatccaatcgtaaatggtcgagcgagcgatacctagtttgttgacaactgtcaggcatacgcaggatctttacggtaggtgatgacatagttggagctccttttatctggctcgctttggacgattn

SEQ ID NO: 5639 - DNA, 736 bp, Photorhabdus luminescens
  misc_feature (657)..(658): n is a, c, g, or t
ctggtaaaatcaaactgaaagactttaatttcaaagcagatttgggacctaaatcacaggaagcagatttattgatttctatcgaaggtgtccgggaaaagtaatacgctgatgacttagttcggtagtgtaatttattaagggctgcgcattgcgtggcctgttttgttgataggcaaaactttcttttcagttgatgtcatggatgatactgtttttatatacagctttaatgtaattgattgtatgtggtttttgggtagataagatcttattgcaactgcattaaccgaataataaggacagagaattgtgggatgacatctgccaagtgaaatagtgtgatttttcacttggcattatatcaataaaaatgtttattactttattggtaatatatattcacacagtttttatttattctaaaggggagtatcgagactctattatgacctcgacttgaaattcacctgaattatcaccaaaagtacccggtacgtcattgaataaaagtattaattcgccatctacaggaaccgttttatgaagtactccgctgccattgcaaacttcttgctggcgatcttaccgactagagtgcgtattgatgacggatggggattattgggcccaggaccataaggtgctgcccattcnncattatccgggccttcttccccttcctgatcaccaccaaaattggtcttcctgtgtgaaatacccccccggattacct

SEQ ID NO: 5640 - DNA, 678 bp, Photorhabdus luminescens
  misc_feature (373)..(373): n is a, c, g, or t
ttttatcccaatcagcccggccaacaccgataatccgggtttctgggtggatataacccgctttctcaagctgataaagggaaggcaataatttccggcgtgccaaatcccctttagcgccaaaaatgactaaatcacaagcctgagctgtagaagtaaccgccatatgtctctcctcgttgcgggatattgtaattttgttacagcattaaccgataatgtactcttttgaccatggcgcgtaaacagagataacgaataaccatcaccatgcgttaacaatatgtttctcatatgagaaaaatgtgataaatttatgtaattttccaacgtttatgaaagataattaccaatatgaaagttagacacttgncatacttttatgaaaaacattaaattattgtgacttcctactgccagcttcaatttgctaatagtatattttcataaaaatttacatagattcctctcctgaatgaaatcgccaaaaaccacaggtaactgcgttttatgaatacactgtaaacgggtccaaaacagtatcgcaatttctgagcaagtcacaaaaaaaagtgccgcagaccattctgtcttcaccgcaaactgtaattcataccagtatcgcaacactggccaaaatggttgaagttatcgaaccccggttaacccgtttgccgg

SEQ ID NO: 5641 - DNA, 752 bp, Photorhabdus luminescens
  misc_feature (523)..(523): n is a, c, g, or t
  misc_feature (586)..(586): n is a, c, g, or t
  misc_feature (658)..(658): n is a, c, g, or t
  misc_feature (705)..(705): n is a, c, g, or t
accaaaaccagatactaagccgtcggcaccggcgcttaagtctaaaccagacattaagtcagagtcgaaacctgaagttaaaccgattgaaacagccccgcaagggcaggcttatatcgtacaactgggtgctttgaaaaatgccggaaaggtagatgaaatcgttgccagactgcgtttgtctggttatcaggtttatacggttccttcatctccggttcaggggcaattaacgaggatatatgtcggtccaaatgcgtctaagcaacaacttgactcggcattatcagaattgaaaagtttgactggattacaagggcaggtaaggagttacaggccgtaataaaagtgggtaatgcctatgtgacaaatctatgtgacaaataggacaactatcatgaagaagtaaatattaagtgactgcggcgatgataattattcaaattcgtcgtcttaattattttcagtgggataggaaatctgctacgcaaacgttttcgttttctgttagaatgcacctganacggatgccgaggtgtctattttggaattaaaacatgggttggattgattacgctattatcgncattattggcttctccgcattagttagcctgattcgtgggttattcgtgaggcattatcactggtcacctgngggtgtgctttctttgtagcaagccatttctatacttacttagcggnctatttcaccccgtttgaagatgaattggcgcgtaacgggatcgcta

SEQ ID NO: 5642 - DNA, 678 bp, Photorhabdus luminescens
  misc_feature (478)..(478): n is a, c, g, or t
gtgcacgactgaccatcaacgttaacaaggcgcatttcaacttgcttgcccgggcattgccccaattgttcaatgataacaatcgcggctggctggaacaggccaagatcatggggccgaaaaatctgggcagccgtaccgaccaagctgtgatctacctttccaaagccgggatcgagcatgctcaaaccatcagcgaaaagcttagcgaactgttaccggcgacagcctttgtcgaacacaccccgacaggtatgtatcgcgtgggcaagggcatttcctactctgaaacggccgcgggcggatcgagcagtcacggtcagtcccgggcacaactgattgcggcagcaggtacacagtccttgctgaccgatattccaatcgagaagaccctgacgcataccttgcagacacgcgggtacgatgtacacaacccggcgttgctctcacaagcactacgggatagcgagctcaaagngacgctggcaccaatgagtggcgattctgagcctcgtcaggtcagtgccaatatccatcagttcgcccccgatcctgtgttgttcgccaaatccaacactatcaataccgagacattaatcaggtcggggagtttcccagcagaagggaacgcccagctagtgaaaatcgaatcatgcttgtacgagctcgaatacactg

SEQ ID NO: 5643 - DNA, 761 bp, Photorhabdus luminescens
  misc_feature (698)..(698): n is a, c, g, or t
  misc_feature (746)..(746): n is a, c, g, or t
tacagtcagcagcctctcaccattttgatcttattctgatggatattcatatgccaggtatggatggcatctgtacttccaaccacatccaccagctaccgcaacactacagtacaccgatcattgcagttacagcttatacctgccgaccaaagagcgatacacactctccatttgaggatttcctgaccaaacctctcgatgaacatcgtctgagagtcgtgttagatcgctacgttaaaacaccaaaatcacaacatattaactggccattagcactacaacaggccaccggaaaagaaccgttggctatagatatgttgcaaatgttggtagatttactgccaaccattaaaacaatcacagaaaaagttttgtcaggggaaacggtggaaaattaccagcagcagatccataaactacacggtagctgctgttatagcggcgtgccacaacttaaagctctctgccaattaattgaacaacaattacaacaaggtgtccaattaaccgatatagaacctgaattgttggaactgacagatgaaattgatcatgtccttaccgccgcccaaaagatattgagtcgcggctagaacattctagaacattaagtgcacacaataaatttgcgatactcctcataaacataattatctgtcatgccactgatgtaatcctgaataagacgagcgcgnatatagaattcgagcaagtctttttcagcttggatcagtggcacaatnttctctactgcttca

SEQ ID NO: 5644 - DNA, 678 bp, Photorhabdus luminescens
  misc_feature (455)..(455): n is a, c, g, or t
accgtgaattggtacgtgatcactttgccattctgaaagtcggtccggctttgacttttgctttacgtgaggcgctgttcgcactcgataaaatcgatggtgaatggaatggggaacagggcgcggctcatctgcgtgccacgctggaacaggtcatgcttgagcagccggagcactggaatcgctattaccacggtacaccacatcaacagtttattgatcgtcaatacagtttgagtgatcgcattcgttactactggccgcatccgcaggtacaacaggcagtgaataccttgatggataacctgcgtggtcgcccggtttccctttcactgctgagtcagtacctgccggagcaggcgcaggcggttaatgccggaaggttggataatgacccacactcatgggtgttggataagattcgttctgtgctcttgagctatgcgctggcttgngagcccgaggtacaaggagttttagtatgaatgaactgttttcctataccgaagcttggttgcgtgagcatcatgctctgcatactgccagagagattcatcaacagcctgagctttggcgtcagttatatcaaaatctgcaacgtgaggaagcgttatggccaccctttttgcagcctttgttatccgatccagagctacagctacagatagtgctgtgtgg

SEQ ID NO: 5645 - DNA, 765 bp, Photorhabdus luminescens
  misc_feature (560)..(560): n is a, c, g, or t
  misc_feature (630)..(630): n is a, c, g, or t
  misc_feature (764)..(764): n is a, c, g, or t
aagcttggtatagtttacgaaggaaccgttgaagctaaggcaggttttctaacgggtggaatggtttccagttatatccgtgttcctggaattcaccagggattattacgagacaaaaaatcctggatatacaatattatttcacctagggaaaatatgttatttatctgcctggacggtaaagatgattttttatttgtgactcagagtaaggatgggaaagttatcgatgatttggaagtcgttcgcatagcgcaggcaggaataggttcagatgctgaggtattagtccttggcaatacgatatggaaaggcggtgttgctctcgttgctgataaatattctgagggtagggtatatttagcaggagattctattcacttatttgctcccaccggtggttttggtatgcatacagggatcgacgatgctagcaatttagcttggaaaattgttgcgtctataaatggctgggcaggtaatgcgttaatggattcttatgaaagcgagcgtcgtccaattgcatggagaaatactgccgctgcacgttcttatacacngcagacagcatcactatatgtgcctgcaaatttagaggatgcggattatgcgggtgatctggcgcgtganaagattaatattgagttaagtcattttctctgtcaatttacttctatcggtgtggaacttggtgcccgatatgatagttcttctcatattattaatagcgatcccgtaccggatgatgattggcttaattatana

SEQ ID NO: 5646 - DNA, 679 bp, Photorhabdus luminescens
  misc_feature (679)..(679): n is a, c, g, or t
tctgactgaagccgtcactgggattgaaaccatcaaaaccaccgctactgaaaaccgtttcttacatcagtggcagcgtattctcagccaacagttgactaaaagcttcgcggcacagaaaagcggtttaatcgcaggacagggaatcgattttgtccagaaatttacctccgcgatcctcctatggtggggggtgaccgaagtcttacgcggtgaactgactccggggcaacttatcgccttcaatatgctggccggacacgtcacgcaacctatcctccggctggcacaggtttggcaggattttcagcatacgttaatcgcgttgaaacgtgtgggggatattcttgatgagccaatggaaaacagtaaacagggattggcttctgtacctgagctggaaggccaaattgaattcaaaaatattcgcttccgctaccatgacgatacaccggaagttctggcgaacctgtcgttattgataaaatcgggtcaatttattggtataactggaccgtccggttcaggtaaaagtactctcacccgtttgctacaaaggttatacgtacctcaacatggaccaagtttgattgatggcatggatttagctattgctgatcccgtctctttacgccgcaatatgagtgttgtgctccaggacagtatcctgttttttggn

SEQ ID NO: 5647 - DNA, 758 bp, Photorhabdus luminescens
tggtcaacgcaatgttgccagatgcagtacagagaggatagtttgaagcgcaattttttgctgtcaaatcatgtgggattacaggagtagggattaatgtctaataacctggcttatcactatttgccggaagaggtccataagtggccgggattaccactttcgttaagtggtgaagaagtgatgccgttggattaccgagcgggtgacagtggttggttgatatatggccgtggcctggataaacaacgtattagtaattttcaacatcggcttggcgctgctattgtcatcgtttcttcatggcgtattgatgattatcaggtagtacgtattgccggaaatttgactgctcgtattaaacggctagctgatgagtgtcggttagatgtggttcccttggggcagatcccacggttgcggtcaccaggtttgctggtgatggatatggattcaacagcaattcaaattgaatgtattgatgaaattgcccgtttggctggcgtaggtgacaaagtggccgaaattactgagcgggcaatgcaaggagagttggatttttctgatagtctgcgagagcgagttgctcagttggcaggggctgatgctgatattctgcgacaggttgtagaaaatttaccacttatgccggggctgaccagtctggtgcgtaagttacaatcctttgattggcatgtggccatcgcatcgggtggttttacctattttgctgaccatttacgccagaattacgtttg

SEQ ID NO: 5648 - DNA, 674 bp, Photorhabdus luminescens
attgatcgcatccggggttcggtcaaaaagcagcttttcatcgctactcatagtagtttgattgcaactcggttgaacctcaagaaagtactaatattgagcgaagaaaacttgtcccaaccaacttctctcaaagatctcagtcagagcacagccaatttcttcatgaaggctcccgacaacaatgtgctggaacttgcgttgtgtaagaaggctatccttgtggagggagatgctgagtttatcctcatggatgccctctataaaaactgcactggaggtgcaagtactgataccgatggtatctatgtaatctctgtcgatggaacaagtttcaagcgttatcttgagctagccaagttgcttggcatcaaggttgcggctatccgtgacaatgacggggactacaaaagcaattgtgttactaactatgctgacctcatttcagattctgtgcagattttcgcagacgctgacgatgctcggtacactttcgaggtttgcatataccaagataatacgaccatttgtgaaggtcagttcgcagcaggtcgaaaaaagcttaccgtagaagatatatgttaaaaacaagacggaagctgcattcgaattgctcgaacaaagggaaccgaacttgtcgcgccaattacattcagcaggcatcacatggataa

SEQ ID NO: 5649 - DNA, 774 bp, Photorhabdus luminescens
gtttgcttaggcattaaaggaaatacagttatgttgcaaaaaaatctccaatcatatgtatgtgatgtttcagataataccactgcacacacagaaaactgtgcgcgaagttctattctagaattatcacacgatacatttagccttaaacaccaagaagcaacccaagtagaattactgccacgccgccacctctatacttatacagagaaagcccggcaaaaacgtctggattatttagcaaaacataccggacatacattgaaacatgtagcagatacccatctggatgcaacgcaattaacaaaaaccattgaagggtttatcggttcaatagaaatccctgtgggaattgctggccctatcttgataaaggggcaatatgctcaaggggtatattatgcgccacttgccaccacagaaggcgctttaattgcgtcaatatcccgtggctcctcagccattatgcaatcagggggtacaactgcgcgtgtacttggacaacgaatgatacgtgcccctcgttttgaattttgcagcgtttcgcacagcattatgttcagtgattggatcaacgaacatatcagcgaactacggtatgaaattggacgccattctaagcatgcacaattggtggaagtaaagccacaaatcatcgggcgcagcgtccatctgcaattcatctataatacagccgcagcggcaggtcaaaatatgaccaccatctgcacctggtatgcctgtcagtggatccaacaacagttagccaaaagg

SEQ ID NO: 5650 - DNA, 694 bp, Photorhabdus luminescens
ggtgtagtaaggatggataacgaacaaagtttcgttgttgctgatatcccagggctcattaaaggtgcttccgatggtgctggcttgggtattcgcttcttgaaacatttggaacgttgtcgggtattgctgcacttaatcgatatttgtcctgttgatggatcagatcctgttgaaaatgcccggattattgtcaacgagctacagcaatacagtgaaaaattggcagaaaaaccacgcaggttggtgttcaataaagttgatctgttggagccagaagaagctagacagcgtgcccaagctattgctgatgaattgggttgggaaggcgacttttatatgatctcagcgataaatcgtcagggtgttaaagcgctttgctgggatattatggagtttatgaaaactcagcctcgtaatatgagcagaacagaaggtgaaactcagcctgagaaagttgaattcatgtgggatgactaccataagaagcaattggaacaggtttcggaagtagacgatgactgggatgacgattgggacgaagatgacgatgaaggcattgaagttatttacaaacgctgattttttcactttctcatcatactttctcatcataattaacggcgccatctctgtggcgccattttatcagttgtgttgggataaatctttgtatagcctgctttcgaatcga

SEQ ID NO: 5651 - DNA, 829 bp, Photorhabdus luminescens
  misc_feature (19)..(19): n is a, c, g, or t
  misc_feature (566)..(566): n is a, c, g, or t
cctacagcacgtacctggngatctctagagtcaacctgcaggcatgcaagcttatcctgatggcagaatacccgatttaagaggcgagtttattcgtggctgggatgatgggcgaggtgttgatagtggccgtgttattttaagcgcacagactgacaacacaaaaagaatacaacttacgaaaggactccctgatgggcaatttctttctagttatcaaggtcctgtagatagataccagttcccgctggggcgtgatgttcttgagagtgccactgttacatcaattgctaacaatacaggcggtcatgaaacccgcccccgtaatatcgcatttaactatatcgtaaaagcagaataatatcgtaaaggtagaataataatgacacaagaaaatattttagatactgaaaccgctgtattaggtgaagacggattagcaattcaagctggctggataaaagtttatcatgctaattcctatacgagagaattctctggctctgatttcgaatatgttgcggaaggcgtgggtttgtcagcgcattcttatttggacgcaccanacctgtccgattctgatgatatggctgtgcgtcgcagtgaggatggaagttattgggaaattgtcccggaccaccgtggaaaaatagcttacaacacgcaagcgggtgtacaggaagaagtgactgtactgggtgaattgccgaaatattaacattcgagcaaccgttcaccgattttgatcaatgggatggtgaaaatgggttacggactttgaagctcaaaaagtcagtcaaattggacaggcagagcaacacgggctatt

SEQ ID NO: 5652 - DNA, 697 bp, Photorhabdus luminescens
  misc_feature (526)..(526): n is a, c, g, or t
aggctgaaattacccgggcatcttcctgctctcattgcaggaactgctgtgatggggatcatgaacttattcgatcaacatgttgctactattggttctgaatttagttatatattgaatgatggtacacaagggcaaggtatccctcccatcctaccgcaatttgttttaccgtggcatttacctgatatgggtgctcatcaggttgatataagttggtcaacggtttcagccctattacccgccgccttttcaatggcaatgttaggtgccattgagtcactgctttgtgccgtggttttggatggtatgaccggtaagaagcatcactcaaacagtgaattgattggtcaagggttgggaaatattgccgcaccattcttcggtggcattacagctaccgccgcaatcgcccgctcagccgccaatatcagagccggcgcaacatcaccggtttcagccattgttcactctctgctcgtgttattgactttactggcattggcccccatgctctcctatcttnctctggccgctatgtctgccttgttgcttatggtcgcctggatatgagtgaaatacataaagtatcgatctgatccgccgtgcaccaagggatgacattattgcgctggtgctttggatgtccgtcacggtgctgtttgatattgttatcgcattacgatcggatcgtatt

SEQ ID NO: 5653 - DNA, 782 bp, Photorhabdus luminescens
  misc_feature (700)..(700): n is a, c, g, or t
actgatcacattgtctcaatcgggtgaaactgcggatacattagcagcactgcgtttatccaaagaacttggctatctcacatcgttaactgtctgtaacgtagcgggttcttcattagtacgtgaatctgattttgctctgatgaccaaagctggtgcagaaattggtgttgcttcaactaaggcatttacaactcagttgacagtattactgatgctggtggcttaccttggacgtttgaaaggtgttgatgcagaacaggagcaagaaattgttcatgcattacatgcattgccaagccgtatcgaaggcatgttatcgaaagataaaattattgaagtgctggcggaagatttttctgacaaacaccacgctttattccttggccgtggtgatcaatatccgattgcggttgaaggtgctctgaaattaaaagagatttcttatatccatgctgaggcttatgctgccggtgaattaaaacatgggccattggcactgaatgatgcagatatgccggctatcattgtagcacccgaccaatgaactgctagaaaaactgacatctatatcgaagaagtacgtgcccgtggtggattgctatatgttctcgctgatcacgacgccggttccaccgatagtgaaggaatgaagattattccattgccgcatgttgaagagctgattgcaccaatactntatcacgtcccccctggaattggtatcctatgatggtgctctgatcaaggcactgatgttatcacgctcccattctgctaat

SEQ ID NO: 5654 - DNA, 691 bp, Photorhabdus luminescens
cgggatatctgacactcccctcagagaaacaggctgatttgcaaacttacctccaggcaaatacgccaaaaccaatgcggccgggtcaggttaactattggggtaactacccaaaattctttatcagtctgatgaagagtttctacggagataatgcccgtaaagataacgactggggttttgactggctgccgaaatgggacaaaggttatgacgttctgcaattttttgacatgatgtcgaaaggtgaagtgaatggctatatttgtcagggctttaacccggtagcctcttttccgaataaaaacaaagtcgttggtgccctgtcgaaactgaaattcctgatcacgatcgatccgcttaatactgaaacttcaactttctggcagaaccacggtgaatttaatgaagtcgattcatccaatattcagacagaagtcttccgcctgccatgttgctgttttgcagaggaaaatggctcaatcgttactctgggccgctggttgcaatggcactggacaggggcttgtgacccggagaagccatctgtgatggggaaacccttcaggaatcttaaacgtctgcggatatgtaccctacggaagggggtgcatcaccagaaccgatgctgtcatgacttggattacctcacccggacaacccacatattaagagtggttaagagagtaag

SEQ ID NO: 5655 - DNA, 775 bp, Photorhabdus luminescens
  misc_feature (434)..(434): n is a, c, g, or t
  misc_feature (507)..(507): n is a, c, g, or t
ccactcatcatgcggagtaattattgtgtagatgaatttgaaaacgatgaaaaaaaccagcgccagcccaaaacacaagccaaaattgcctacaccatgcataaattgagtaaaagcctgttcttcattttccaatgtgatcatttatgccaccactttaaaatcagtttggttaagttgaataccggtgctcagtaccatcaatctatccaggtgactccctacaactttttcttctcccacaacctgaagttcttctgttctgttatgagcaacctgacgcgtatacaccatcacaaactgatcagtttcggttatgtgaccttctttactgtaagttttttcggtaacagccaccggcttaatgttgtcccataacggagagaactgggtaccatcgagatcatatcgtctgcttggtgtcacgataccgntttcaatcagcgcatcccattgagcttgtgaatcgatcggtttagtttgataaaaataccacaaactcacttncttcacgccgtcatacccttcaccttcttgaagcacttgaagataaccttcgtcatcagtgcaataacgaaccaaacgcacgttatcacctagatcgactacaccaacggaacatataagctcgagtgaagctgcattctcgatggttacgtcagatacaatcagtctcagcatcagtgggtctatctcaagtgccccaccatacgcatacctaatacttacggaccttttgtacagaaggcgcaaccgcgttaccccccgatgcgct

SEQ ID NO: 5656 - DNA, 691 bp, Photorhabdus luminescens
  misc_feature (482)..(482): n is a, c, g, or t
tggcggcatcaacaccatttctgataccgccagaggcgatcagtggcatatttggaagtgcctcgcgtatttcacgcagtgctgtcgcggtcggaattccccagtcagcaaatgccatggccaatgcgcggtgatacggtgtggatgctcgttctgcttcaatcgctgcccaactggttcccccagccccggctatatccagcatactgacgccagcttctgccaattggcgtgcgacaggaagcgataagcctgaacctacttctttaacaattataggaaccccaagttttgttacgagttgttcaatagcatatagaatatggcaccagttacggtctcctccctgttgcagcgcctcctgtagcggattcagatggataattagagcatcggctccaatcatctgtactgctcgcagagcataattaacccgaattctggataagaaattgacgagaagcctgttccaggagcaaagntttggtgtgcaccaaaacagcttcgaggggggaacaggctatggacaacttatttgaaattttctgggatgtcgacgattcttgccgttttttcatctcttaatgtgaacaatctgtcttgatagccgggctccgttacgccgccaccaggtcatatgtatcccaccgaatcatgaccatttcgattcttctcatatgttccattaccg

SEQ ID NO: 5657 - DNA, 768 bp, Photorhabdus luminescens
  misc_feature (753)..(753): n is a, c, g, or t
aatggtgtagctgcgttcgataagtaaataaaaagttgtctgattgggccggtaatatgaatgttaaagtagtttagcaatactccaataattgcaccaataattagcgggtttttagctaaagcaaggatagcaccacccagatttttcttacttccgtgaccataatgattcattacgagtacgctcataatattggtaataattatcatataggccacaaaaaatccggataatgcaactccctcactgccgaatagtgattgtgaaagtgctataaaaacatatgaattatatctaactcctccttggaaaatggatgtaaatagatctggtgtagtgttaaataaaaatctaccgatgaaaataataatagcgattattattgttgaacttatggttgatacgattggatagaagttgtcagaaccagagaaattagcctcactaatatctaatattaataagcaaggaaaaaaaagatagtaaacaaacttatctgaaaaattccagaaactagaaacgtgctttatatatattttacataggaagccaagagtaattagcaagaatataggtagaattgaaaagaaacattaacatctggtggtccttcagatagaaaaactctatgctctatgtgattaaatatcgatgattccaaggttaggtgagataaatacgccgctgaaccacccgtgatggtgttcctatattatcaaatgtcgcggtaaatctatctcttgaatgcanagctagccggttgta

SEQ ID NO: 5658 - DNA, 688 bp, Photorhabdus luminescens
tgcggcgtgatgacttacaacaactcatcagagcggcggcagaactggaatgtgactggaataaggtactgggtgaccgcataaacctagctgacagacatcttttacagcactgggtattacagccgctatttgactggtggctccgtttgttggagccagagatagacttctggttcactgaatttgatcagctacaaatccaagaacggcaactgcatgctaaagcgcatttttggcagcaagccgaaagcgtctcgtctcaatgccgggaacaacaacataaagaggttacatctttgcaaacagcgcttaatcaacgcaagcaactattagaaaaacggctgttgacaacggaaactcaggcgcgcgaagcatggcccaactggtttactgggctagatgccctccaaactggcggcgacctaaccgcttttatgccggttcccgaagcactgtcatcctgttgggcgtgggcgactactttagagcatgacaccgacgcggctactcacttgcaaaaatggctctgtgcccctttcctgtgcctgccacaggaccaatttcactgccaatcgacgacctaattattcagaggaaacatgcaaactctacttaatcatttggcccgtcgtttaggccatacgcctcttgctccgatagacatggcattccatttgccattgat

SEQ ID NO: 5659 - DNA, 768 bp, Photorhabdus luminescens
agcttggttagaacgctttattgatgatattgagcagcgcctgacacctaacacaacccaacagcctaaaaatccgccgccttccttggtgcgggtttgatcgctaaatacaaaccactaccagaatataagttcaatgggagcttcaatatttagttccctttaaactgccaaggcaaaataatcaagcaaagagccaagcaaaatgctactgcctccatgcaaaaaacccgcaactaagcgggtttttacttattaacaactttaactactcaggatattaccttcatcgctatcgtaaagttgctaatagacttaatcagttaaattaagataatacgataacatttaccgcagatgggcctttagcgccattctcaatagagaatgagacttcctgaccttcttccaatgttttgaaattattactctgaattgcagaataatgaacgaaaacatctttgctaccatcttttggggaaataaagccaaaacctttatcgttgttaaaccattttactgaaccagtcattgaactagacatagaattttcctttaaatttattaagttgccataaggcgttatgaggtctgtttttcagttttacttatgggtactaattagaaggaattcgcaatgaagtggtatcagggataacgctaaatggtgaactgctttaattctaatacttttcattaatacttttcataaataggtctgtacttccaaaccagtgacgctattaaatcacattgattggtcattag

SEQ ID NO: 5660 - DNA, 680 bp, Photorhabdus luminescens
tctgatgataatttgacaagctcgtttgatacccaccgtgacgacataatagtcgactcctagccgattttctttatattagaaaaattgatctgttgatggtcagtattcatcatatagcattggttgtataaaaatgcaacatttgatcacatttaggaacgcaacaatgacaatatctctgagaggtcatcaccttttgtgtatttttacctacgctggcaacggatattccactggttttgttgaaaattacaataggattattcctcgaattcgggacgaggatatcttgattgtggcagggccggatgacatatgtattcctttgcttggagaagacaaacctcattgctttggcgagagtgtcattgtccgggatagtcgagctttggacgctgttggttctcttatgggccgatcaattgatataggtcatacgttgaggcttgatgagacctatttaaaacaggcgcgatgggctttcaatcgtgggatcataagatctgcttgtataggctgtgaatgggaatcgctttgcactcgaattgctgcggatgattattcttcaacgcttcttaaacgaaataggggaaagagtgaatgacgatctaaagcccgttgaatttagcaaacgctgattttgatatgaatgtatgatcacatacttaagacaataa

SEQ ID NO: 5661 - DNA, 759 bp, Photorhabdus luminescens
tacctccccctgaaccctgtacacgttcttccattaagtaacgggcagataaagcaaaacacaatccttgcatgaactttttagactcagcggtatcccctttagtcaggagcacactgccaatttccgggatgattttgctgattttttccaacacattaccatcctggctaaaatggaatgaataagcctccagcgctttcccattcgcgataaggtcgaagatcttattatcaattttttgtagcacatcccctttgattgccccacgatgttgagaagatgttgtcagcagatttttatccaacagtgctagcttattgaccggcaactgattaatcctgttttttgcctctttcagtacggccagatcttcttccatcaatcctgcactgaatcgtccatctgcctgtacaacaaactcggggttaacataactgctagtttcaactatagccgtggactggtaagcctctccagacaaaccactgccaagggcacccactcgctgcggtttagcattgtctctctgtttcgcttcctttgcattagtctgtgcctgaaccactttatcctcagccacggcaatatcctgtttgcctcgattctccgcctcttggtaggcaacgttagcctcatttttggctttttctgctcgctgttgttgtaactgtaccgcttctaaatttattcttttataaacctattatgacatcttggtgcacaccatacgatgctgctcacttttcgctacaccag

SEQ ID NO: 5662 - DNA, 680 bp, Photorhabdus luminescens
tgggtgcgtctggcgcgcccgtatgcgggagagaactatggctttcactggccgttgctggaaggcactgaagtggcgatcgcctttgaagggggcgacccggaccggccctatatcgcccacgcgttgcacgactcagtgcacccggatcacgtcaatctctacaactacaaacgcaacgttctgcgcactccggcgaataacaaactgcggatggatgacgaacgcggtcgggaacatatcaaactgagtaccgagtacggcggtaaaagccagttgaacctcggtcatctcgttgatagccagcgcccacacccagataaacggggagaaggctttgagctgcgaaccgacgactggggagcaatccgggccggtaaggggttgtttatcagtgcggataaacaggcccgggcgggcggcgaggtgctggcgatggaggcggcgctgaatcaacttcaacaagcgcagaccttaaccgaggcattatgcggcgcggctgaaatggctaaagcggaactggcggatttgcagcaacagaaggcgttgttaagtgaaacattagccgagctgaaaaaatccgcgttgttactctccgcgccagaagggatcgcgcagacgacggcaaaaagcctccagttggcggccggggaaatattatcgccaccagtgggaaaaga

SEQ ID NO: 5663 - DNA, 755 bp, Photorhabdus luminescens
  misc_feature (644)..(645): n is a, c, g, or t
  misc_feature (689)..(689): n is a, c, g, or t
  misc_feature (706)..(706): n is a, c, g, or t
  misc_feature (721)..(721): n is a, c, g, or t
taaaacagaaaaaagaaatgtcgctattaatttaagtaaaaactctaaactatctcagcatgcaatatcagatttaacaggtgttagtagagacaccattagaaaatacagtgctgcttaacgggctttagtaaggaaattatatggctaatactaattttttgatcggtcgtggcgaactattaacacatgatatcccatcgcctaaaagaagaatggataaatctgaggtttatacactaacagaagcaaaaaaacgtttaacacctcaaatacaaacaactaacgatatatttaaaaagctaccagcacactcctgcccgcatgattatgcagtagccaaattaacaatgaaccctagctatattgcaaggtcttatttccctacggctatgttgagaaatacagatttaaaatctgtgggtagcaaaactgtaaaaattgtacctgaaaaatggaaaagaaaaatagatgttattgagcacccaactactcagctatttgtagccggaaaacgttcagcatttagaaatttatctgagtggatcagtgaattagaaaataactctgctgaatcaattgatttcgccagaatagaagcgtttgaagcatatctaccggaagaacgttttattattcctgannatatacaagaaacacatttcgaagtaggaattcatcttcttcanaatgatgatgaggattntgtccagcgtaaatntatcgattatgcaaagtcattggatataaccgta

SEQ ID NO: 5664 - DNA, 675 bp, Photorhabdus luminescens
  misc_feature (446)..(446): n is a, c, g, or t
attttatttataacctgcgggaagacattctggcaaaggtgcaaaaaggggataaagtcaaacttcgtcttcctgcgctaggtgacaaagagatcgaagccgaaattcgttatatctctccgatgggtaattatgcgactaaacgtgcaactcgtgccaccggtgatttcgatttaagaacctttgaagtgcgcttgtatcctttacaggctattgaaggtttacgtcctggtatgagtgccttgtggcgttgggatgagtaggtgactgatgcggagcaaggttgcatggcgtggtttcgaacgcgcttttagccaagaaatccgggctgtgattcgtagtccggtttttcactggttaggctggttatttcctttgatgctatttgtgctgatcagcgctaatttttcagaagggacattactcaatctgccagtatcggtggntgataatgatcagagcccgctgtcacgtcatctaatacgtaacttggacgcggcttctcatgcgcagattaaatcttatgatggcggattgcatgaatctcttgaacggcttggcagtgctaaggattactccttactttatatcccgcatgattttgaagctaatgcactcaaaggagaccagccaaccgtgcgtatgtattacaacgcgttattttatggtgccgga

SEQ ID NO: 5665 - DNA, 762 bp, Photorhabdus luminescens
  misc_feature (204)..(204): n is a, c, g, or t
  misc_feature (412)..(412): n is a, c, g, or t
  misc_feature (460)..(460): n is a, c, g, or t
  misc_feature (570)..(570): n is a, c, g, or t
cctgaccaatggagggcctcgggctgtcattaccgatttggggattctggagcccgatccggtgaccaaagagctggttatgacttaccttcaccccggtgtcacgacagagcaggttctggagaatactggttggtcgttgcggatagcctcagtattaaacacgacgcaaccgcccacagaacaggaactgaaagtattacnggatctcaatgagcgtacagagcgtgcgcatacagaagtggcatcatgatgaattttatttaccaagctttgcccggcagagttatcttcggtgccggtaaaatcgctgaaacaaaagcggaggcgcaattgctggggatcactcgggctctggtgatctcaacgccacagcagcttaatctggcaactgatgtgcagtcgatattangcgatattgctgctggtatttatgataaagccgtcatgcatgtcccancagaaacagtagcggatgtcatgcgcgttgtggacgagttgcgcgttgacggttgcgtggcaattggtggcggctcgacagtcggattggcacaggcgatagccctgcanaccgcactaccgattctgacgatccctacgacttatgctggctcagaaatgacgccggtctggggtataacccgggacgggattaaaaccaccgggcgcgatgtgaatgtattgccaaagaccgagatttatgatccctcattgaccctcagcctgccagcttttatctccggtcccagcggcatgaatgcg

SEQ ID NO: 5666 - DNA, 683 bp, Photorhabdus luminescens
  misc_feature (11)..(11): n is a, c, g, or t
  misc_feature (35)..(35): n is a, c, g, or t
  misc_feature (37)..(37): n is a, c, g, or t
  misc_feature (391)..(391): n is a, c, g, or t
atattctgcanaatgaagatcatcgtatcgtattngntattccttggatggatgaattttccattatcggaaccaccgatgtggaatatcaaggtgatccaaaagaggcgaagattgacgatcaggagattaattatctgctgagagtttataacgaccacttcaagaaacaacttaaccgtgacgatatcgtctggacctattctggcgtacgtccactgtgtgatgatgaatccgactcacctcaggccattacgcgcgactatacccttgacatacatgatgaacagggcaaagcaccattactgtctgtgttcggcggtaaattaactacttaccgtaagctggcagaacacgcaaccgaaaagctcatgcaatactatcccacggncggaaaagcctgcaccagatatggtcagctaccggggggtaatttggaaggatgcgatcgtgatggttatgcccgtttattgcgtaaacgttacaactggttaccggaaggcgttgctgtacgttatgcgcgtacttaccgcagcaacagccaactcattctgcaaggtgctaataatctgaccgatctaggcgaatccttcggtcacggcctgtatgaaacagagcttccttatctggtcgataatgaatgggtcgttgaactggatgacgcaatctggcgccgtaccaaa

SEQ ID NO: 5667 - DNA, 777 bp, Photorhabdus luminescens
  misc_feature (325)..(325): n is a, c, g, or t
  misc_feature (370)..(370): n is a, c, g, or t
attggaaaagctaattccggtaggtgcaccacctctttagccgactgacatacaccaaatagtgggtgaaatgtaatggagcaatcttcgataaaactttatatccaaaattagcagcagtttaccccagtggcggatgaccgatataccctaaagatttcaagatgcatcgcgacggcaagggagtgaatccccgggagcatagataactatgtgaccggggtgagcgagtgcagccaacaaagaggcaacttgaaagataacgagtataggggtatcaaagccacataacctagcgtttaactatatgatgagggcagcatantgagcacgttggtacttgaagaaatcccggtaggaataccacttncttggccgactgacataccaccaaatgggtgggcgaaatgcactggagcgatcttcgatcagactttatatccacaattagcgcaagcttaccctactggcagattacccgatttacggggtgaatgtatccggcgctgggatgatgggcgtggggtggatattggccgatatctattatgccggcaactagcagatattgctccacatagtcacagggctgaccggatgtggtccaactcaaatggcggaaccgacggggtaggttcagcgggccgcattctcaatagtgtctaccaaaacgttaactaccgcattgatcctcgcggaataagcatcgctatagggatgggatctggtggttacagctatatggacaatgcgattgctgcttcaacgggacagaac

SEQ ID NO: 5668 - DNA, 698 bp, Photorhabdus luminescens
  misc_feature (66)..(66): n is a, c, g, or t
  misc_feature (132)..(132): n is a, c, g, or t
  misc_feature (323)..(323): n is a, c, g, or t
  misc_feature (594)..(594): n is a, c, g, or t
tagttatgaccctaaatatacgtaaaagttgtatcaaattacgctgctagtagctctttagcgttngccagggtattttttgtcacttcactgcccgcgagaagccgcgccagctcttgtaatctggctttnttatccagtagttgcatttgagtttcagtttcttcaccgtcagtctgtttactgacataaaaatgttggtgaccacaaccggctacttgaggcaggtgggtgacgcacataacctgtgtagattcgcctaattcacgtaacagacggccgacaattgcggctgttgggccgctgataccgacatccacttnatcgaaaatcaaagcggacgtttccattttcttagccgttataacctgaattgccagcgcaatacgggaaagttcaccacctgaagcaacttttgcgagagattggtgtggctgaccggtgttaggggtgacgttaaattcaactctatctgaaccatcagcgttcaaatgttcaggcgtaaaagagacatcaatggttaagcgaccatgaggcatggcgagttgatgcctactgtgcgtaatgagttcactgagttctttagcatatcgntggcgaaccagatgcaatctttctgcaacttccaatgcctgcttatggtgtgtattaacctgctcgcttaggtgggtacagtcatcttcttgctgcgccagtat

SEQ ID NO: 5669 - DNA, 782 bp, Photorhabdus luminescens
  misc_feature (746)..(746): n is a, c, g, or t
cctttttcgccccaatgttcgcacattgggattgataaatagcttgtttccctctttcaataaattaaattttgcattttcaaatatagcggaatttttctgctctaccttgacatcattccccaacgatttcagattaatgcctgaaatccgcggcactcttctgacacgctcacctgaactgttcgacgttggtatcaccctatcgtcagattgtcctttggcaaactttgaagtcgttaaaacgccggtattttccacgcgaatactggcatttatctgtagacgatcaaccgcttgtttagcatcatccaacgcttgtagctcttcttcggtcaatcctttgtagaattttttttcagcttccggtattaattcgggatcaatatagctaccggtttcccccgcgcctgtcgattcatagccattaccagacaaaccactaccaccggcaccggtacgatcaggttttgaatcgctctgttttgcccctctaacatcttcttgtacctgggcaattttattttcagccgcagcaatatcacgtttaccccgatattccgccccctgataggcgatatttgcatcattttccgccttttcggcccgttgttgttgcaataatgcttcttcttttcttaattctgctcttttctgagccgctgcaatatcttggtttgcactggcatgatgctgttcactttgtgctacgccgacctcggatttcttcaccgcttcttttacgntgttgtggttatcccgaatagcttgtcgggcatgct

SEQ ID NO: 5670 - DNA, 685 bp, Photorhabdus luminescens
tactgtccgcgggaagctggatgttcaaaataaccgctgtattcgtcaggtacagtggttttttgtttgatcaatttgtttgatcaaatagcactgagcgcaggcccttccttcagataggggataagtagttatcggagtgtgtaaacttgacgttaaacactccgaattttttgacattaagtggatgtcccgccgtaaccgaatagcggctggcgtagccagagggcggggagataccctcttgtatgatttaaagggatttttgatgggaaaagcatctaatagaagtgcagtgtacctctttacaggaagatattacgacgataatggcggtaatcgtattactgctgttggggctggtggtgaagtttatgcttatggcggaaatgatgatgttaccgttggttcatttaaagtcgatgtataccatacagatggcgaccttacggtaaagggagtgtcaggttataccggtattcataaaacgggaaatggcgggctgtcatttacgggggctgccggtgtagctgctattgatcacacgggtgaaacgggaaatttaaattattcgggtgcggccggttataataaactggtccgtaaagggttgtctggtgatactcgttttagaggggccggtggatacaatcagttatggcatgaaactaacccggtgaattta

SEQ ID NO: 5671 - DNA, 776 bp, Photorhabdus luminescens
taaattatggcaccggtacatttgaggggatccgggcttattgggatcaagacaataaccaacttaatctatttagagtgcatgagcactatgaacggttaattcaatcagctaaaacattaaaaattgaattaccctataccagtcaggagttaaccgatattactaaaaacatcattattaaaaatggtttcaagcaagatatttatatcaggccattagtgcttaaaaagtcgttaatgccgggtgagaaatttggcgttaagctaagtggtgtaaattcaaccctctgtattaacgctttacctatgggcgcttatgccaaaaaagcagagtttacatgtcttatttcaaaatggcgacgtgtatcaaatgcggcaattccatcatctgccaaaattaccggcacttatgttaattccgcacttgctcatgaagatgccaaagaaaacggatttgatgatgctatcatgttgaatgaacaaggcatgtgcgcagaagcaagtacatcaaatgtttttattgtaaaagataattgcgttattacaccatcgcttagcgctggcattcttaatggaataaccagacaatctgttttcgatatttgtcaattccgcaatattccttgtattgagtcagaaattcaacaaaaggatctctatgaagcagatggctgttttttacaggcactggccttgaatatcaatcgtttacaaatagacgatgtgtcatatagaccaaaagaagattctatagcccatgttattgcccaagat

SEQ ID NO: 5672 - DNA, 688 bp, Photorhabdus luminescens
ctctctttggggttagatattccttatttttgctggcatccagcgcttggaagcgttggcgcttgccgccagtgtgcggtgaagcaatatcaaaatgcggatgatacgcgcggtcgtctgatcatgtcctgtatgactccggcaacggatggcacttttatctctattgatgatgaagaggctaaacagttccgtgagagtgtggttgagtggttgatgactaaccatccgcacgattgcccggtatgtgaagaagggggcaactgtcacttacaggatatgaccgtgatgactggtcatacattccgtaaataccgtttcactaagcgtactcataacaatcaggaattggggccgtttatctcttatgaaatgaaccgctgtattgcctgttatcggtgtgtacgttactacaaagattatgccgacggcgctgatttctgtgtttatggcgctcacgataacatttattttgggcgccctgaaagcgtaccgtggaaagccagttctccggtaaccctgtagaaatctgtccaaccggggtatttactgataaaacccattctgaacgtaataaccgtaaatgggatatgcagttagcgccaagtatctgtcaacagtgtagcattggctgtaataccaacccgggggagtcgtatggtgaattacccctatcgaaaccgtatac

SEQ ID NO: 5673 - DNA, 780 bp, Photorhabdus luminescens
  misc_feature (412)..(412): n is a, c, g, or t
tatatcaacagttaatagatgctctcggtcaataagcaacaataaggcttgactgggagtagtgctaaatacttctcttgtttttagtgcagaaaaattaaacttataatcttagatttacaatatgtatgagctcacacaaaacccatttgataaagacaaactatcttttttgctgtatttaatgcgttgaaaataagtttataccatgtgtaaaacatagcgttaaaaagagtatttaaaatatgatttttccaaaaaagtatcctctcagcacgataaaaaggctcatctccggctggaaagaatgtagtttcgaacgttaccaacaagcgtattctctctatggtggtggaatatctactcatccagatattgtacgttttttaaatgaaaaatttggcaatagttntatcttttacgtcaaagaaaatccacaaatagaaaacgttatcgaaggggcatactttacatgtaaagatcatcatctggcagcaagtcaccaaaaggactactattttttcagttacgatgaaattctcttccctattgccaaacatctaaaaactattatccctaggaagtcaaaaaccatatcacctctgcacaaagaaaacttcgtcaacatctattatggccgattaaacaagcgaacatatgccttgctaaagaagatttttcttataaaacaagaagacaatcggagtactggaattaataaatttaagcgtgcaggcggagaatacatcaattgatgacttccctgccagaattcgttgt

SEQ ID NO: 5674 - DNA, 704 bp, Photorhabdus luminescens
tggcggcactgcttcctcagaatgaatacagtcgtattgttgcaacttccgtggaaggtgaagtattacattgtagaggtgagttggctgatgcattagcgcggatgcaacaaaccgagcagcttgcgcgtcgttttcatgttcatcactatgcgttgtgggcgctgttgcagcaaagtgagatcttattagctcagggatatttgcagacggcttatgaaacgcagaataaggcatttgaattgatccgtgaacagcatttggagcagttgccaatgcatgaatttttgttgcgtatccgttcacagcttttgtggtgctggtctcgtcttgatgaagccgaagaggcggcacgtcgtgggctggaagtgttgtctaacttccaacctcaacagcagttgcaatgtttaacccagttggctaaatgctctttgaccagaggggatattgataatgcccgccgttatctggcgcgttgtgaaaacctgctgagtaatgggcagtatcatagagattggcgtacgaatactgacaagctgcgagtcatcatctggcagagtatggacgacaaaagcgccgctattcggtggttggcacagactgagcggccgaaagcgtccgtaatcatttctatcatggccagtggcgcaatattgctcgtgctcagattctgtctggtttgaatgatgaagctgaatccattt

SEQ ID NO: 5675 - DNA, 757 bp, Photorhabdus luminescens
  misc_feature (413)..(413): n is a, c, g, or t
ctgattcttccccctataccgcacatgatataatgagccagtgtttataatatttggttctttttttatgactgttgaacacataccgccttctgaacaaatttatttactcaatcaagagctagtccaaaacgctgatagtttagcagggccagcaatcactgttggtggtcaagctgtgcgctactgggtaaatacataccttcataaatactcgaaagataatttacctaatgaagttttcataacttctgttgatgttgattatgtaacaaaacggaacaatgttgaaaacatcgccagagcattcaacgttgaacctcactataacaatccacttgatttcccatctattgcaatatgccttctgaccgataaggacacaaagacaattaaagagcatgaaggccggntgttctctaaccctgataacaatgatgaatgtaaccttgctgatatcatcgacccgccagcaggttttgaacacgaccatttatctggtgacgaactatgcttgaatacagaacgttggatgattgatgccccgccaggttctgatgacctcgcgcgcgttgtgaatcctatcgctccgcttgcatctgcagtccgccacattgcgaacaaatcccagacgatcttgacgccataaacaccgctcataagcctacgatgcgtcttattcctcctgcggaacagccgagctgcaatttcgaacaggccgaacgttgcccgacttgtatccgctccacaccaccgt

SEQ ID NO: 5676 - DNA, 697 bp, Photorhabdus luminescens
ctcgtgaccgtgttgaagatgcaacgctggttctgaacgtgggtgatgcagttgaagctaaatatactggagttgatcgcaaaaaccgcgttatcaacttgtctgttcgcgctaaagacgaagctgacgaaaaagacgctatcgcttctgtgaacaaacaagaagacgcaaactttgcaaacaatgcgatggctgaagctttcaaagcagcgaaaggcgaataattcaagtgaataacggtggataacacgtaagtgttatccaagtgcggtagtttagggaggtactcatgaccaagtctgaattaattgaaagacttgctggccagcaatctcatatttcggccaaaaccgttgaagatgcagtgaaagaaatactccaccatatggcaattacatcggcagatggtgaacgtatagaggtgcgcggatccggcagttttttttttactaccgcgctcccgcgcgtatgttgtaaccttaaaccggcgataaagtggagctggaatgcaaatacgttccccattcttaacctgggaaagagttgcgtgatcctttcaatatctacgattgagcccgaagcatacatgcgtttgcctattttaaacagccgctctataatggggctagatttataatcaaatcgctggtccttcggttagtctttttttgatttacgcttgcttatacataattag

SEQ ID NO: 5677 - DNA, 757 bp, Photorhabdus luminescens
  misc_feature (407)..(407): n is a, c, g, or t
  misc_feature (578)..(578): n is a, c, g, or t
ccgcttctatggcaatcattcttgtttcttgttctaccagttttgccagtgaaatcgttggtggtggcgacccagcacaccatcccgatattttcgctgccgaaggtaaagcaacggttgtgaatatcgtgacgccctcctcttccgggctgtcacataaccaatatctggattacaacgttggccagatgggcgtcgtcctaaataatgggctagaggaaggtcaatcacaattggcggggcagcttgccgctaaccctaatttgaatggtcaagcggctaacctgattctgaatgaagttatcagcaggaacccttccctgttattaggtcaacaggaagtgtttggtatcgcagcagattatgtactggcaaacccgaacggtatcacctgtaatggatgtggntttatcaatactaaccgcgctcctctggctgtgggtaatccattgatagaacaaggtaatttgcaaggtttcagtacgtttaataatccagaactagcctgaaaattaaatcggatggtttaatcgccaatgcgatgcttgatcttatcgtacctacaattgacaaccggngctcagcccctgctcaaaaagagattcatgcgatccccggcgaccctacatctcacgcctaggacagctcttgctcctgaagaagcgtcacccgtgtgccggatacgtccatctccgtcccattcctcactacgctcctaccaccactgctcacatgttatacccccccccccggcccc

SEQ ID NO: 5678 - DNA, 691 bp, Photorhabdus luminescens
  misc_feature (632)..(632): n is a, c, g, or t
tctggtgagttcaaaacgtctatggaggcaactctagtcatgaaataacgctgcgctggcaaggtatttaaatatggcatggtggcttagccgccataggtatttcatctcaataaatcgcactatttcatttctcatgtggtaacaaattgacccgttagtcaccagtggagagtaaaatgacaatcaatgttaatgattcaatgctgcttcagataagcggtagccagaccgatttgcctggaggtcagactattaccggcaaacaaagtaatcatggggattttcggttgccggcctgtttgtctcatttgaaggatacaccgttgtacatggcagtcgcgtattggggattattgaaggggagtggatttaccaaaagtgaaatcagccaggtgttccgagtgacagaacgccgggcaacagatgtgatgaattatatctacaatgagcgacgtgatgtgatcgcctgtgaaaaagtcttctttcgtgagatgcagggaagtcgcccgcagatgctaattgttaccggcctcgctgaacccatgcctcagaaaggtcatgcgtcggtaacgaaaacggtgaagtcgacgcgctcccggacttatcacaagctaatcacatgtgcattnggcgcacttggtttttgcagcgggcttgaggcccgttatcctctgagtcgatcacacct

SEQ ID NO: 5679 - DNA, 775 bp, Photorhabdus luminescens
  misc_feature (730)..(730): n is a, c, g, or t
tgatagacgtctatagtggaaaaattcccgggaataaaatgttctttaattctgatatacttaaatattatacaacagaaggagcacccgcatttttcaattcacaaacctttgccaatgaatttgttccacaaagtatagatgatttgaaatcagtactatttgaacatattttaaatgattggcgagatgttatttcccataaaataaccgttcctactttaattttttcaggtgaaaacagcgactggatagaaagccaacaatggatttcatctactgtaccaaaaggggaaattataatttatggtcgggaagagcatggagatcacttcttagcgcttaaagatccattaagattttcaaaggatctttctgctttcttttattaaaaaacaggagaaaagaatgtttaccggactaagtgcttttcctttaacaccgctgtatggcaacaaggtagatgagaagacatttatctcgcttattgaaaatcttgttgaagctggagtggattctatcggcgcactgggatcgacgggtagctacgcctatcttacattatcggagcgcgcgcatgtcgcccgactggctgttgaacatgcgaacagtataccggtgatggtcagcattggagcgctgcgtgtagcggatatactcagccttgctgaagatgctcaacacgcgggtgttagcgccgtaatgctggcacctgtttcttaccagcgtnccacaccggacgaggtgtattcgctctatgaagaagtcagccgta

SEQ ID NO: 5680 - DNA, 692 bp, Photorhabdus luminescens
  misc_feature (570)..(570): n is a, c, g, or t
agccagtaagttattgcgtgatcccgtcagtgttgaagttgcacgtcgtaactctgcttctgaacagattgaacagcttgttcactttgtcgataaaaagcgtaaaggtgagctgctctctttcttgatcggcagccgtaactggcagcaagttctggtatttacccgaaccaaacatggcgcgaaccgtttggcagaacagttaaataaagatggtgtaacggcttcggctattcatggtaataaaagtcagggggcgagaacccgtgcactggctgattttaaagatggccggatcagagtgctggtagcgacagatattgcggcccgtggtctggacattgatcaactgccttatgtggtgaattttgaattgcctaatgtcgctgaagattatgtccaccgtattggtcgtactggccgagcagatgcaacagggcaggcactttctctggtctgtgttgatgagcataagctgttgaaagatattgagcgtttgtaaaacgggagattccccgtatggcatttccctggtatgagccagatccaacgatcaaggctgaacctatncaaaacggtcgtcaggcacgtggcgataatcggcagaaaaatagccatcgccgttctgcggcaccttcgcgtcagcgtagcagcagtcatgatgtattccataaatcggctaacgtcagagg

SEQ ID NO: 5681 - DNA, 749 bp, Photorhabdus luminescens
  misc_feature (627)..(627): n is a, c, g, or t
taatcctgatacaatcaaagtaatgtatgattttaataatgtaatccgttctatatcaggagatgtatcagcttttaatccagagggaatgagtgtggctgaagtaagtaatctgcttgattcttgtgatatttcaggccaatggcaatatataaatggcgctattgttccgcgtaagtacacaaagggcgagttagttgctcaagcagaaagacgtaaagaagaattgttagcccttgccagcaatactattgctcccttacaggataccgttgagctagaagaagcaactctggaagagatagagcgactcaaagcctggaaaaaataccgaatgcaagcaaaccgcattgatcccaccatagcaccagatattgagtggcccgcacaaccagtataaataatataggcccgccgttcacaaaccgcaggcctttttctactctgactctttaggttaatcaataagtatttacctaatgtgccaggtcttattggaatggaaaaaatacctagccatactaaaccgggttgatacttcaaaagcatcggaaatcgacaggctaacatagcctgtcatcacagaaaaaagaccggggacaggataatgcccggtcttgataattntattattttggtatttgtggccaatcaacatctgaaaccattgaagtatcaacacggctcagtaataccacatatttcttccaggcaagcaataatgctttttctgtgtcagaggccatctc

SEQ ID NO: 5682 - DNA, 669 bp, Photorhabdus luminescens
  misc_feature (575)..(575): n is a, c, g, or t
aagctgacctatttaaggtattcatatttttcatattcgattatttaactggtttattaaaaaatttattctgcggttgaaaatattattaaagcggtttattttccattaatagttttatgatgggcagattttaaaccatgattaaaggccgttgttttaccttctagttttaatcggtataaggttttgaccgttgtttttaccacttttaacacctgctttttatgaggtttaatcggaagttttttggcatcctgatacaaatgtactatgacgaccacaacccaccccgctttcacgcctactacgatgaacatatagaaaacatcctaaaataagcctgtttcttgtacagaccgatatctgattcacaaaaataagtcattaaaaatcagtcaactataaaaaaatcattttttttctcatattaactgtaagaaattaatgtgtggtgcgactaatcgagtgaagcaaatgcttgtttcagcaaagcagtaattcaccttctacacaaatataaaaggaatgttctatgactaagcaaacgacaaaagcattactggccctggctntaggcagcgtatttattacggcaagcacttcagcaatggcggattccggcagcaaaatggagaaatgctatggcgtttctctgaaagggaaaaa

SEQ ID NO: 5683 - DNA, 767 bp, Photorhabdus luminescens
  misc_feature (424)..(424): n is a, c, g, or t
tacacaaatcaatatgataacccgtgacatttgccagtcgttcagcagaaaatggttcaggtaacggatgatgaggttccattttgccagggccatactcactgtcaggtataccgccgagtgccttcaactcttgtatggtttgtaccgtaaaaaatgcaggtggcacagtcgctgtcttcggatcgttagagaatattaccttaccgtcaaaatccgaggtcttaagttgctttggctgccgttctacaccaatcagatgatgattctgatgtaatattgccaaagtttcagcaaccgttcttattttatccatagatattctccagaatttaaatttatacccgtcatctttcagttggctgcactctctcaccccggtcacatcgttatctatgctcccggggattcactcctttgccgncgcgatgcattttgaaatccatagggtatatacgcatttcaacaacgggtatgccagaaaaataatttctataagaatcaattaggcaagtatgtatccacgttacagaaagcgattgaatgcgatatttaaatgacacaatctaaaatattaatgcaattccccacttttttcattaattaacgagaatatttccctgatacatcacaacccttttaataagtactgaactaatgcttcaatattatatttgtctcattacgtattattacaaaatacaaatataagaattttaatcatgattatattgcttgaataataacatcgagcaacacgcactatt

SEQ ID NO: 5684 - DNA, 683 bp, Photorhabdus luminescens
  misc_feature (98)..(98): n is a, c, g, or t
  misc_feature (257)..(257): n is a, c, g, or t
  misc_feature (265)..(265): n is a, c, g, or t
  misc_feature (347)..(347): n is a, c, g, or t
tcgccaactgttaggagaatcagcggacacctatcctgctgattgatggtattggttcaatgaatggtttaattccggttgcagaattaacgcgacanttggctgctgctggaggctatgtctatgtagatgatgctcatggtatttccattatggggcgtcatggtgcgggttatgcttttgctgcacttgaccatattttgccatccaacctcatacttgcaggttcattatccaaagcatttggtggtgccggnggttttgnggtggttgcaggtgccgatgatgtcgaagtgatcagtaccttagcgaatcctctggtttttggtcattcgatcatggtgccnatgttggccgctaacgttgcctcaacaagacttcatctcagccttgacatagacatccggcaagagcagttatggaacaacatccatctgtttgattctctgatggagaacatgctgatgaatgcggctgtgcaatctcccgttcgcggcgctttacttcaacatgaagcggaaaggcttgaagctgctcgtttgctgcgtgacaactgcattttattatccccggtattttatccactggatcctggatggcactgcactgttacgctttgctttttctagcgacctcacgcaggcgaatcaagccgctccatataccttatttgaataaaggaa

SEQ ID NO: 5685 - DNA, 770 bp, Photorhabdus luminescens
tataattaggattatcacctggataatatttaattatgccgtcagaagtccttgcatcttggaacacccaaataactccaacataatcccaaaattgtgtcataacatggagccttagtggcttaataacgctatgcgggcctatcactggaacgtgtacaagtacatcagtcaaatcaccatctgccttgatcatataatcagtctgcaaatttcctccagataagtttatatcacacatgtcacctatgtaattactgagtacataaacatatgtagaaacttgtgaatcaatgagtttttctaattctactattttttcttgcatttcattcacctatgttattagtaaattaaacaaaaaccataaaaagattttgaataaatttaatctttgcattcaaaaacacaatacaaatccaaaattaattaatttgataaactaatcctctaagtacctcctcaagattgaaatagattgctggtagtaaactttatcttctattcgacgaaagcatgactatttttattcatcatattacgttgttaattaaatatagccaaagttctattccttgccactaaattttaaaattattttatgacatcttatccatcttcatattgaaatactaaaaacccataaaatcatctattaaaaaaattaaattcagtgaatcattcttcttttaacaccaataaacaacataaaacagaatagataataagattccaaatagtgctacatctgataccaccaataattctat

SEQ ID NO: 5686 - DNA, 688 bp, Photorhabdus luminescens
accgttggcgtgccaagaatattgaggagaaaacagaaactcatgtggccacaccaaaggctttaagaacagctttggaacatgaaaaaacaccagagctggcagagaaattaacggaagaatctaaacagagagatgcatgggccgcagaagttggtaaacttaaaattcctaaactggtgcagcaattggcattaaatgcattcaaagagcagattagcgcaaataatatccgtttacacttgcgttcgagccagcgccaccttaattctgctttcgcacaaaagtcattagcgggggctttaagtgagttgtacggcgtaacggttgaattcagtattattgaagatgataatcctgcggagaaaactccgctggagtggcgacaagccatttatgaagagaaattggcacaagctcgccaatcaattattgcggataaaactattcaaacattgcggcaggtatttgatgctgaattggatgaagagagtatccgaccggtttaaccatgctgcaatctgtaccttgttgtacgatgtagccatagcgaagagagaaatctatgtttggtaaaggtggctcgcgcaatttgatgaaacaggcccagcaaatgcaggacaaaatgcagaaaatgcaagaagagatcgccagtctggaagtacggcggaatctggagcatgtctgg

SEQ ID NO: 5687 - DNA, 704 bp, Photorhabdus luminescens
ctgaaggtagagtgtcttcttaatgatcagtactcaacttatggaataaaaattcaatttaaaaaaatcagtatccattaattatatactcattctacttttagatgctggtttcacatgcgatttattttaaataatataattatgaggttagaagcctgcatcttcacgcttaaatgatatagaaagaaagtaaaaatatttcttaatggaattaaacttatactgtagtgtaggaaatataaataaaatgaatgatatctataacttaataagaagagtatcgtataaagttggtaaaaataacattagtagaaaaaactttttgtttttggcatggaatttaatcattttactaagaaatggcaataaaatggagacttattcaaatgctaaatagagtcaatgatatattgcacatcattggtagtggagtaatgcattacaattggctatcttcattaggaactatttctgctactctctggtatcctgcatatgcagggagtggtaccgtaaaacgataccgaaatatattacatgcaaaatcagaagaaagtgcgatccccatgggaacaaattggccattaatagtaatttctcatggttctggtggttcttgttctgatcaatcataccttgctgagtttttatcaacacaaggttttgctgcgttagccgtggatcatcaagatattcaggat

SEQ ID NO: 5688 - DNA, 667 bp, Photorhabdus luminescens
aagtgaacgaggaataaaatggaaggtactttaattatttgtgttgattcgattctgagatttcgttcagattacgatacgacaatcgctgtgccgatgttatcagttcaggaacagttaggtaaaaatgatccgttctttttcttgaaatatttcagaaataaggtcctaatagaaaaaggagtaacaatatcaaatatatttctcgcgatagaaccgtggcaggctatgctaagcacttggttggaaattgatatttctgcttacattgcagagattagaaagccttctcaagaagaaccgatatttgattggatcagcattcagagaatcacgtcggttcatcgggtatatcagcgaaaagatatgaaagataatgaaaaactgtctgaatattttaatcgtgaacatacgccgacaaaatattttaatattgaatcagtttgtatggcatcgggttataggaaaggcgataaagagcattacagtatcagtgaatatatccatgaaattaaaaatattccagtcattgccagtgacaggcaaatattaattggctatgatgataataataccgatattttgaatgataaatgttttggtatatatgataatagacatatcaaatatatacaggggaacaacctcgtttgcgttttatgaattg

SEQ ID NO: 5689 - DNA, 705 bp, Photorhabdus luminescens
aagcttgctgagtagcgttttatctatctggtgtagcgcgtaagatagtattaatgcagcagaaaggtaataaataatcatgattactttgggaacgttatgtgcaagaaatacgtatatagagattgaacatagtgtaattaaccatgcaacgggtttcaccatagaccaaggtgtaatatttacctgttcggtataaacatctgcaaatggtttagctggaaaaaagtagccaatagccaacatgaaaataacattgagaacaaataaaatgccaaccagatgaaaaaagtgcaggtcaatttttaaaataaaattacagataatataggcagacatcccgaataataggccaagtttagcggcaataggcggcactcgtttggtcatcagaccaactaataccacgctgagaattggcgcgttaaaaattccttgtaattgttgaatgagatagaacagaccatccggtgcattagcgactaatggtgcgacgatcatagtgattaacgctagcccgatccctagatatttactcatagcgactgtttgagtttcggtggcattttggttgattcgcggcttgtaatattgacgataaacagtgttacagatgaattaagtccgtcgctgaatgtggaaaataccgcaccgaccaccaccggggcgaagaaaccaaccaatatttccggtagaattaaatgg

SEQ ID NO: 5690 - DNA, 684 bp, Photorhabdus luminescens
  misc_feature (544)..(544): n is a, c, g, or t
  misc_feature (684)..(684): n is a, c, g, or t
tactgtagctgttcttgctgaaccagaagaaattgtattacctgaatcccgtacctgttcattgaacgctgaagaactgaaacctgttctggtcgctccggctcctcatacaagagccagaggtgttaaatcttaccgtgataaaacaaaaatcagtaaggtcgttgctgctaagaagccatatgtaagtatttctgactctggaacaaatactcttctgaaaacaacctcttctaaaaccccaaaaaggccatccagaatcgcccctgaacatgttaaaaggatacaggctactccacgtcaggataatatctttaaacgcttcactgctcttttagttgattttatcagagataaatttatatgggctaaaacgaacaaaactaaagttgatattatcagtgaagaacatgataaacgtattgctgaaaactatgtctttgatgaggtattaggccgtcgtgtttcacgtagtgaatatgagaaacaagctaagtttaaccacgatgactataagccaacaccggatgagatcactcgtttnccaagtcgtattaatagcgttaaatccgttagtgattacgataatgggacgtcaccttcattaccactcgaactaattaagggggtaaactttcttaaactcaagccatcaagctctaatatcattaagaaccaatgacn

SEQ ID NO: 5691 - DNA, 746 bp, Photorhabdus luminescens
  misc_feature (325)..(325): n is a, c, g, or t
aagcttaaagctgatgttgcttttgaatttttctacaaactcaatattcctttttattgtttccacgatattgatgttgcccccgaaggttgttccttaaaagaatatatttataatttgggtgtcatgtccgatattcttgcagataaacaagcagaaactggcgttaaattattatggggaacggcaaactgttttacacatcctcgttatgctgccggtgcgtcaacgaatccagatctcaatattttcgcttatgcatcagcacaagtatgtcaagttatgcaaatgactaaaaagctaggtggtgaaaattatgtactgnggggcggacgtgaaggctatgaaagtttgctcaatacagatttacgtcaagaaagagaacaaatcggccgttttatgcaaatggttgtggattataaatacaaaattgcgtttcagggaacattgctaattgaacctaaacctgaggaaccgactaaccaccatatgattatgatggtcccactgcccatggcctcctaaagcagtccggcttattaaatgaaattaaggcgacttttgaagctaaccatgccaccttacctggacacttcttccaacatgaagctgcccaccgcgattgcctctgtcaatattgggctccatttgatgccaatccccggcgacgctcatttggggtgggatacccgtccatttcccaatattcgctccacagaattctcttgccatgtatgaaatcctaa

SEQ ID NO: 5692 - DNA, 676 bp, Photorhabdus luminescens
atcctgatggcagattacccgatttaagaggcgaatttattcgtggttgggatgatgggcgcggtgtggatgctaagcgtgtaattttaacatctcaagaggatgccattcaaaaaattacgggaacatttacaactatcagagctgttgttattaacgccgctggagcattttcacttggggatagtacacatagaggcaatacacttgatgggggagactacggaagagtggtcaatttcgattcatcacttgtcgcacgcgcagccacagaaacccgccctcgaaatatcgcctttaattacatcgtaaaagcggaataataacacaagaatatatcttagatactggaatcgccatagccatattagctctgaataatatcatcgtttatcatgacccctggcgctagcaaaatcattttcacggataataaaagctcatcagggaagatgagcttttattgctttctagacacgcttgaagttcgcattgaccatcgcaatcatatttggaaaaccagatgacaagaatacggttcctatgctctgaaaagcttcagtatgttatcgatgatcacttcatcatacgaacgaggcgcttctcccctatccggaatagggatcccggaatgctttatatcagcagtttggccggtttgaaaaaattgctaatt

SEQ ID NO: 5693 - DNA, 716 bp, Photorhabdus luminescens
  misc_feature (471)..(471): n is a, c, g, or t
  misc_feature (499)..(499): n is a, c, g, or t
aagcttattcgcagagccgctgatcgatacacagccggaattactggattggggtaaatatcgtaaagttctggattactatccggtgagtaataaattacccgcctgctatggattacaggccaaaaaacctacgccacagcaagtacaactgcaccaatttatgcttccttttgaacagatgttggctaacggctgcgctgaacttgccctcttaccgaaactcctggcttttaaacaacggggggagaccgtatatggtgtgcaatggccttttaaagcgggcacggtcaattacaacgttcatcaacagatcacctctgacttaaccgcaaaactaaactacgattcacaaatctatattaatgatgacattcagaggtccaactatataaaagagctggaaatcttagatcatctattgcgttattttggcgctcaacttgccgccagaccacttaccctcgactntcaggattttctggatacccaacgcggntatttagcccaacaaccggaactgacctatcaacgtaataatattcggattgataaaatatcggcactacaaaaacggattgctgcccggctaggtttaggcggcgaatgtctcaatgacacgcttgatctggctaattagccattccatttaattgaacatcgcccattactaccggcaaaacccgatatccaatttaatactaagctaaagtctg

SEQ ID NO: 5694 - DNA, 690 bp, Photorhabdus luminescens
atgttattctgagctgcattaaattaaagctccataattggaggatgtatggatcaccgtttactcgaaattattgcctgtcctgtatgtaacggaaaactcagttacgataaagagaattttgaactcatttgtaagttggatcgacttgcgtttcctgtacgtgatggtattcccgtcctgttagagcacgaagcccgcgaattacctctggatgaggaaaaataaggcatgttcactgttattattcctgctcgctttgcttcaacccgtttacccggtaaacctttagccgatattcacggcaaaccaatgattgttcgtgttatggagcgggcgaaacgttcaggtgctggacgtgtcattgtggcaacagataatcacgacgttgttgatgccgttgtggctgccggtggagaggcttgtccgaccaacgaaaatcaccattctggtactgaacgattagctgatgttatcaacaaatatcaattctccgatgatgaaattatcgttaatgttcagggcgatgaaccactgatccccgaagagattattaaacaggttgcagagaattcggccagtcgcaaagcgggaatggcaacgtcgcgcgcgcaattcatgatgcacaggaagcttttaaccctattgctgcgaaagtcgctatggataaacagggttatgcactctatt

SEQ ID NO: 5695 - DNA, 727 bp, Photorhabdus luminescens
  misc_feature (488)..(488): n is a, c, g, or t
aagcttacgctagtaccttatatcacgcctaccttgcttatatgaaaggcaataacctgaataaaccgatttctgtaacccgtttatggatatgccgggtgcattggcagagtacgatcagcattacctgcgcaagatataggttatcaaaagtagatgtgttatgaaaataacatacttgatccaataaaatacaatagtactgtaaaggcaattcttagttttctttctggaagagtattggctaattttgctcctaacaatgctcctggtattgttggtattatgaataaccatagataattataatttaaaaaacctatatttccaggtggtaagttatttttatttaggccgagtgatatcataaatattagtacaaatacagaatacaaccagactacaacagttgttgtccctattgattttttaatatctaagccaatgctctcataataaggaacaacaaatgaagctgccccggacanagttgatattaatcctagtaaaaaacagccaatataacgaaatgaccagccaagatctctatttgtatcatttttgttgggtattagacattaatctctgtgttgacctactcgccaaaattagtgttgctaaagagaagacctatataatccgatcggcttgaaaccaccgtcatggttaaacaacctacgattgaaccactcatcattagcggagcataccattctagaacattcca

SEQ ID NO: 5696 - DNA, 818 bp, Photorhabdus luminescens
tgtgagttacacttcttgctcctggctggtatgacgtgtgcgaattgtgagcggataacaatttcacacaggaaacagctatgaccatgattacgccaagctatttaggtgacactatagaatactcaagctttaggctttgagttagtcggcttggagtttattcgtgcacgtgtttctacactgcggatttatattgatagtgagaatggtatcactgttgatgattgtgctgatgttagccaccaggtcagtgcggtattggatgtcgaagatcctatctcagtgctttataacctggaaatttcttcacctggcttagaacgcccattgttcacgactgaacattaccagcgttttattggtgaggaagtcagtctggttttacgtatagcaatgcaaaaccgtcggaaatggctgggcattattaaaactgtcgacggcgaaatgatcacggttacggtggatggaaaagatgaagtgttcgcactgagcaacatccagaaagcgaacctggtaccccacttttaaagttcggatgaggcaactaggatgaataaagaaattctggctgttgtggaagcggtttccaacgaaaaatcccttccacgcgaaaagatcttcgaggcgctggaaacagcattggccacagccaccaagaaaaaatatgaaccagatatcgatgttcgtgtcatcattgaccgtaaatctggtgattttgacacctctcgtccgtggttagttgttgaagaagtgactcagccgactcgtgaaattacgctagaagcggctagatttgaagagcctgaactcgatta

SEQ ID NO: 5697 - DNA, 721 bp, Photorhabdus luminescens
  misc_feature (10)..(10): n is a, c, g, or t
  misc_feature (612)..(612): n is a, c, g, or t
  misc_feature (622)..(622): n is a, c, g, or t
aagcttttgngtaaccgccaatgtatcgctattaccaaccacatttgtaagctggacaacacctttttgtgttaatgaagcactgggaatatctgttgtcattttttgctctagcgctttatttaattgagcggtgagtttggctatgtttccatcatccagaacatcattgccagatcgtgtcgcgataaaatcagtcacggcagatgataccgctgacgcttgacgtaataccttatttaataagtgggtgggaacattatctggtgaaaatccagtttgtaaactctgatttacctcgtatttgtcttgactgattacattcgcattatcactagtagaaaaagccttaaaatcattcttataactcatatactttctcctgcaattaaataatattattttacaacccatatattgaattattgtaaaaacaatctctcttgcaattcacgccaatcaagtctagttcagaaaaagaataatgcagcgttcttattacttataacgctaattatttttatataattggtagtaatacatagttcaacattagaaacgacagcccggaatttatctattaatacccattacgtatcactattgacattnttattaaaanacccagatatacgtctcactggcaaccagtatttaccctgtttttctctctcttctgcacgaggtttgactggtttactatgtcacgcttgacgcgact

SEQ ID NO: 5698 - DNA, 679 bp, Photorhabdus luminescens
  misc_feature (501)..(501): n is a, c, g, or t
  misc_feature (504)..(504): n is a, c, g, or t
tggtgagcatattcgtactgttattacccgcatgttagaagttgccttattggtggggggaatgatggctgccaacgccattctgccgggcatgggatttatggtggtggcggggatttatctactcaaccgtacggctaaacgtcctttggttgaaatggcgattgggccgattgcaacgattgtagttggggtgctagctaacgttatttatctgttctccccctttattttgtgatgataaaaatagagggggggaagtgagggagaacaggagaacagatagtgaacacatatccattacctagtctgagcatggagcaggcgcagcacaaacagtttcatttagttgacattatttgccgccattttcccggtgctgatttcctcaccaccggagatttagggctggtgccgggattgaaccggccacagattaacgcaacgtgttgaaaggtcattgccgatttcttttctgctgaggctgctgtcgtagtacanggngccggcaaccggcgcattacgttgggggctatcggcattacttaatgcgggtgatcgcttgctggttcatgatgccgccgtatatccctcgacggcgattattgccgagcagatgggcttgcatctggtgcgggccgatttaatcaatccgacacatccagctgcgatctgcaaa

SEQ ID NO: 5699 - DNA, 711 bp, Photorhabdus luminescens
  misc_feature (586)..(586): n is a, c, g, or t
aagcttcgtatagtgcaattggaccgggaagaagtcccggtgtaatgaaacctgatattgtagcttttgggggtgaaacatctgaatattttcatgttctcacggaaggctctaagcctaatattactcctgagcgtggcactagctttgctgctccatatgcactaagaaatgctgtaggcataagagctattttaggtaacaatctcaacttattagcaattaaagcactattgattcactcatcaaaaaataaagatcatccaagcattgaagttgggtgggggaaaatacctgaagatttaaatgatattattgttagccctaatggtgtagcacgcatcgtatatcaaggggaattaaaacccggtaaatatttaagagcccctgttccgttaccaatctcaggcttaacaggaaaaataaatttaaccgctactttctgttacgcaacggctacagatccacaagactcagcatcatatacaaaagccgggttagaagtatcttttaggccgaatgactctagaattaaagacggtaaaaagaacgctgaaaccgcaggttttttcgaacttaaaaaatntgccactgaaagcgagcaacgttctgatatgggaaaatgggaaaccgcccttatgcatctaaaatatgctaagttccactctaaaaagcccagcattccacatacattataatgctagagagtcc

SEQ ID NO: 5700 - DNA, 674 bp, Photorhabdus luminescens
cccttcttttattgcttgagcgccagggacttgaccctgtgcgagatgttctgcggcttctttacgccccgttatgttatgggccatctgcttcatcgggtcatagtttgcttttaaagcactcgctttttgggtgattttgctgacttgttgatcaccgtaggattcagagacaggagatggcatctgaggcttttcaacttgttgatttttatatttgtaaagctcgtatgccataccgccaatgcctaatgcacctgttgctacggttttaaacatacgcccatcttcatctatgccggtcattggattatttcttaccatacggtacaaattcagaccatctacggttccagccgggtcagcgcttaaccatctaccggcccacggttgataatagcggtagccgtaatagtacagtcccgttgcatcacgttctttacctgaataacgaatggttttgtaaccagcttcaatctgatttcttgctgcccatactgcggtgccaccataggggtaatacctctcccaactggatcatttctccgtgcatatccaggtctaatttcgctgctgtgtgtaagattatcgtagctatatctgacttgatcgttattcatgccggcgggtcggccttcttcccgttgagcacccgtactggtgctcttcctgct

SEQ ID NO: 5701 - DNA, 691 bp, Photorhabdus luminescens
  misc_feature (630)..(630): n is a, c, g, or t
gcattagctttctctgttggtgctcaggcagcagacaaaattgccgttgtaaatgttggtgagattttccagcagctgccagcccgcgaagctgttgtgaagcagttggaaaatgagtttaaaaaccgcgcatctgaattgcaacggatggaaactgacttgcagtccaagatccagaaattacagcgtgatggctccactatgaaatccagtgaacgtactaatctggaaaaagaggtgatggctaagcgtgaagaatttgccaaaaaagcccaagcttttgaacaagatcatcgtcgtcgcgagatggaagaacgcaacaaaattctaagtcgtattcaggacgcaatcaaagtggttgctggcaaagaaggctatgatgtcgttattgatgcgaatgctgttgcttattcagtatctggcaaaaatattactacaagtgtattgaaacaggttaaataacagatgtcttcaattcgattggctgatttagctcagcagttgaatgcacaattacatggtgatggcgatattgttatcaccagtattgcaccaatgcattcggccaatggcgaacagatcacttttttgtctgacagtcgttatcgtgaacgtttgggtgaatgtcangctgccgctgtcgttcttcaggcgtcagatcttccttattgcaatattccagcgttggttg

SEQ ID NO: 5702 - DNA, 707 bp, Photorhabdus luminescens
  misc_feature (693)..(693): n is a, c, g, or t
aagcttaaaccgctactatgatcccgtgaatgtggcgcttgcagggctaaatgctcaggatatttttgggctgcatcgacaattggctgacaaatatttgtcatgcgatcctcctgtaataaagcgcatattgatgcttggtggcagcaggtgtattgaaaagccgtttggcagttttgagcgatgtattatcttcacgcatcatggcccctcctagacgagggtgaatacgtctggcactctgttcaaatgagtggtacagcatgttgtacagccggctgccccggtattgcggtgcgactgccacggttttcagcaacccaatggtgggctgaccgttttgcaggactgacagactcaaaattatcccggcaatttcgccactaggagttttagccagaaatgacgcagggtaatggcaaaaaggtttgataaactcctcaccgcaatgctgctgaaatgcgggccaagatggcgtggcataagcgaaattctcaccaaacaccgagtcgataaaagaatagagtttaacctgttcttgcatccataattctggcgttagcggcaataatgtcgcttgaacctcaggaagtctttgcgcacgttgatgagcctgctgaaagttgtcttctgttgcttgggtatcgtcgaatattgaggtatagcgatagcggatatcaaatcctaactctnttaacaaaaggggg

SEQ ID NO: 5703 - DNA, 680 bp, Photorhabdus luminescens
  misc_feature (12)..(12): n is a, c, g, or t
  misc_feature (644)..(644): n is a, c, g, or t
cgtatagtgcanttggaccgggaagaagtcccggtgtaatgaaacctgatattgtagcttttgggggtgaaacatctgaatattttcatgttctcacggaaggctctaagcctaatattactcctgagcgtggcactagctttgctgctccatatgcactaagaaatgctgtaggcataagagctattttaggtaacaatctcaacttattagcaattaaagcactattgattcactcatcaaaaaataaagatcatccaagcattgaagttgggtgggggaaaatacctgaagatttaaatgatattattgttagccctaatggtgtagcacgcatcgtatatcaaggggaattaaaacccggtaaatatttaagagcccctgttccgttaccaatctcaggcttaacaggaaaaataaatttaaccgctactttctgttacgcaacggctacagatccacaagactcagcatcatatacaaaagcccggttagaagtatcttttaggccgaatgactctagaattaaagacggtaaagagaacgctgaaaccgcaggttttttcgaacttaaaaaatttgccactgaaagcgagcaacgttctgatatgggataatgggaaaccgtccttcatgcatctaanaatatgctaggtctcactctaaaaagtccagtattc

SEQ ID NO: 5704 - DNA, 716 bp, Photorhabdus luminescens
  misc_feature (55)..(55): n is a, c, g, or t
aagcttcaacagattcaattctcgcctggcgcatgatgggcgggtattggctacngcaatataaccagctaccggctgaatccaccataatacggcatctgactcctcggtgtgctgcggccataagagcatccgtcacttgctcaaccaagccgccggtttgccagatgtaaaacaccatatcaatactgtgtttggcattctcaatatctttgataatggtttttagtgaatggtcataggttttcagtagttggatcttgttacctttaacacccgccagcccttgccgtcgttcgcaaagctggaatagtggtgtcgcgacttcgctattttctgtcgcgaagatatggcgagatttgcgcaattcttcaagccatacggttgttgaaggccacatggcttttgcttgttcaactctgcgttttcccaaatgcagctcaccaaatgacaggtaagcgatgattccaactaagggtaggatatagataatcagcagcccggtcatagcagaagtgaccggccggcgttttatcacaatgcgtaaagtgatactggcaacaatcagccaataaaagaaaatagccagcccacttacgacggaataaaaggtcgtcatattcggcattcaatcctcgttttgctcagaccatcttggtggcgtttaacgcggctccctcaagactggggatatacctgctatctttcaagctgcc

SEQ ID NO: 5705 - DNA, 657 bp, Photorhabdus luminescens
aatatgggtacccttaccggcgcaccgaaagtacgcgcaatgcaacttatcgctcactatgaaagtgaacgccgtggtagttacggtggggctgtcggttatttcaccggcaaaggggatatggataattgtatcgttattcgctctgcttacgtggaagatggcatggcgacgattcaggttggcgcaggtatcgtactggattccgaacctttagccgaatccgaagagactcgtaacaaagcaagagccgtcattcgggcaattattgaggctcatcaggcagaggagactttctaatggcaaatattcttctgctcgacaatgtggattcattcacctataacctcgtcgatcaattacgtaatcatggtcatcaggttgttatctatcgcaatactgtggcaactgaaatgattatgcagcaattaagaatgctctcctctccgctattgatgctttcaccgggaccgggtaaaccatttgactcaggttgtatgcctcaattactccaacaaattattcggcaaaatcccagtgatcggcatctgtcttgggcataaagcattattgaagctatggtggaaaattctgctgttgaagaaatctacacggcaagcttctctggaaacacgatatcaagcatgttcgctatct

SEQ ID NO: 5706 - DNA, 670 bp, Photorhabdus luminescens
  misc_feature (5)..(5): n is a, c, g, or t
  misc_feature (19)..(20): n is a, c, g, or t
  misc_feature (36)..(36): n is a, c, g, or t
  misc_feature (40)..(40): n is a, c, g, or t
  misc_feature (52)..(52): n is a, c, g, or t
attgntcattctctgccannagttaatggctgtttncggntttttaatacangatgaactcatatactctccaacgttatggtgacggaatactgaggagctcgttttacctagcaccgcaagatgctaacactcacaatgcaaacaatatcccagaattaatgtacaaaaccttacagatgactaatccatgagtttaacggggcagtccttgctcctcgaaacctcatatcccctgctctcccttatacatttcccgatgcatcgcgactgcattggagcgactactcggcatcataccatccttattgactggtgcgagtgtccgccgcacctaagacctacctcttccccacaaccgcttttttcttcccaccgaacgatcctgttctaacgataaacacccccttcccccccaaccatactgacgcccgtccccattccccccttaaccccttttttcccctcaccacccccatccttgccctccacttgtcccattcccaaccatcttacctatccttccccttttccactctttgttcactctcctgaccttcctctcccctacgtcttttgccttttccctatcccacctcccttgttcatctcggtccgacatcccctggccgccccgcttatcgtccctttttccgttcccgccttgcgt

SEQ ID NO: 5707 - DNA, 732 bp, Photorhabdus luminescens
aagcttggatctcggtctccgtgtctgatttcagataggggtgaaagcctcctgtatttccgtaatatttatgaaaaacgtacgttgaagtggtgttgctcccagtgatgttgctcccaatattgtgatgaaacggcatcgtgtttaccaagtaataagtccactaggatagctgaagtactttcccgtcaactttatttttgctgatgtttcaatgaacgatacaagaggctgctcttgctataacgttctcttctcctatttccttctgtagtgctgctatactcgtgattaaagtttgtgcaatgctgcacttgaacctgcaccatgtgaaactgcggttttacaaagtgattgccctcttcattagcttaaaaagcgattcaaggtgttaagtaattaaagatgatttggcataggggaaattcttaaagaaaaaaatatttccttaaacttagaaaaaatgagcttattagactaaaattcatttatccataggactctggaaaataattcaaatatctatgcacaaatttaatcgatccaccgaaatggctgtattcgttcaagtaattgagtccgaaggtctctctgctggtgctcgtcagctccatatgactccgacagtagtcagtcagctcattaatcgactcgaaatgccacttggtgtaccggtgctgaatacaccacccctgaacttcactcaacggctgaaggttctgtttttatgac

SEQ ID NO: 5708 - DNA, 724 bp, Photorhabdus luminescens
aagcttcatgaatataagatcaaacgcttttatatgataatgtcatttttattaacttattctaaatataaataatatcagaccagaaaataattaattgagaagattgtattaagtatagcgttcaatattttaaatataccctatggatttcaagatgcatcacgacggcaagggagcgaatccccgggagcatagcgaactatgtaaccggggtgagcgagtgccgccaacaaagaggcaacttgaaagataacgggtatatcagtgtatgatcagtagttggtacaagagggcaattaaatcttggtttgtgcttgcgtatgccaatatttgaatttcatccccaactacatcataaataacacgaaattgccgatctttggaaagccattggtgaaattgcattcctttatccagcaacattgaacaatagccgtatgctaacgggttctcccctatccgttccgatgattcaattaataaatcatccaccaaattctgagctgcttccaaccctatagtattagcctcgtagtcttcaataatagaaagtgcctggtaggctgttacggtaatttgaactctatatatcacacccgacgttccttgcgcctacgaagtgctacttaaagtgtcattcttctaccttctatagcatctcccttagacaactacgcgattttaagccatgctatcgacctgtcgtctacccctctttcgg

SEQ ID NO: 5709 - DNA, 687 bp, Photorhabdus luminescens
  misc_feature (440)..(440): n is a, c, g, or t
tctcaaaggcactattgggatgtaacgccagaatgccgcaaaatggtagagcacttttgtccgtgcgtgaaggtgataaaggccgggttgtggatttggccgctaaattgctgaaacagggctttgaactggatgcgactcacggtactgcggttgtgctaggtgaagcggggattaaccctcgtctggtgaataaagttcacgaagggcgtccgcatattcaggatagaaccaaaaatggtgaatatagctatattgtaaacacgactgcgggtcgtcaggcgattgaggattccaaacttattcgccgtagtgcactgcaatataaagtgcattatgacaccacattaaatggtggatttgctaccacaatggcactgagtgccgatccaactgagcaggtgatttctgtacaggaaatgcatgcgatgattaatagntagtctctattctgattaattgaagtaataaaaagtgcgctctgtttagcgcacttttttatgtttactgaaaaattaaagagaaagaatcactgtctgttatcccagtgctactttgacacctaatccaatcaaaacaatgcctagtattttatcgataatcttgtgagccttacctatccgcggcgaaccggtgcacttgaatcaatacgcctaatattggccatagatgactgacaatcccaaa

SEQ ID NO: 5710 - DNA, 767 bp, Photorhabdus luminescens
  misc_feature (17)..(17): n is a, c, g, or t
  misc_feature (33)..(33): n is a, c, g, or t
  misc_feature (53)..(54): n is a, c, g, or t
  misc_feature (64)..(64): n is a, c, g, or t
gtcgtgatatactaccncttcgtcactaggganaacctgggccgtgcaagctnncaccggcggntacatcttgccgggtgcgagcgcgaatcaccgaccaaactcatgggacgtgacatatttccctccattaactaatgattaaatattaatttcagcttccaacatctggctatcatgacgccataacttgattaaagaaaacttatctaaataaaactcattgaaataaattacatgattatgttaatcaaacacctaaaaaatttacatcattaactgtttgaaacaaaaaattatacatatttaaattatcaaccttgatatccatcagctcaaaatataaatttacattaatatttgatcataaagagagcaaaggtaaatatgaaaaatcttgaagatttctatcgggaagcactttcacaaataaagcatgatctgagcaacgcagcgcaagagcatccacaccttgctccatttacctgcgaatccggagaccctgatgtttcccgattactgcaaggctttgcgcttacaactgcccgcattaaccagaacattgatgatggccccccgaagtaataaaccctcttccccaaaaagatgggccgatacctttacctccgatccccttaaccagcattgcccatctagatatgctaccggccatcatgacctgaaccacaacccttgccaaggcactgaaactccccccctacagcgcacccattctcacctttacaatcccccacatttcaggcttg

SEQ ID NO: 5711 - DNA, 669 bp, Photorhabdus luminescens
tggatgaatactaagaataaaaaattattgcagacgatggaaagccggctactgcctcacattgagatttacgatttggcttctttgacagcattgatataatgaagagattattctgtataaaaacacagcaacctctgggtgctgtctaatcaattgatggtaactatggacgtctcctatctgctcgaaagtctgaatgacaaacaacgggaagctgtagctgctccgcggactaatatgttggtattagctggcgcggggagtggtaaaacccgggttctagtacaccgaattgcttggttgctatccgtggagaaggcttcgccattttctgttatggctgtgaccttcaccattaaagccgctgttgagatgcgttttccgattgaaaaccttgtctgtacccattaatgtggaacgtgcatcggaacctttcacggcttggctcatcgtccctacaatcccatgatttggatgctcgttgccacatgaccttcagattctcgacagccaagcatcatacctggccgctaaactgatcatgcaacgatcaacctcgaagattaaccttggctacttgtctacggattcgcttcatcatgggataaacatcacggctctccccccacccattcaattttacgcacgctttcacgcccctgccca

SEQ ID NO: 5712 - DNA, 718 bp, Photorhabdus luminescens
aagcttatgaccatactcgattgcttcagtgatgtttatgcattggcagttgatcaatatgagatatattaaaacgttgatggatgaaactgtatgcttctgaacacatcatcccacgtttaccaacaagcatatttacagcatcacgtaatagagtgtgttcatcagttatgattttaggagagtgataattccctactttcctaattgatggcaaaacttcatttgtgacccacttacggaaacggtgaggaatagagccttgcttaattgcatcacgacaacgaagtactaaggtatacattccggattcgctgacaacattaatatcatcctgatgccctatattaaacatagaccgctcatcatcatccaatctttcaatagcttgcgtgatattttgaatttctagagcagagcaaacatcgtgagcaacaaaccacggctcaccatctttattgataacgcggatttcatgagatccgaatttgaatatagcgaaattactttgcagctttaattctagctaatgcattcatatggccacctccctactcaagaattttgatattttcaggcaaaaaacttgctcacaacacgctctgaatcatcatctttagccacagctatgattttatgttccgagtaaaccttgttaaagcctatctcgatacccaccgactgctgtttacccatgcatgcatagttgcacttgcaa

SEQ ID NO: 5713 - DNA, 677 bp, Photorhabdus luminescens
taactggcgtgcctgtattgggcgtcatgccttggttggatattgatctggaagatgaagacggcgtagcgctacaaacgggcaaatatgatggcgcgacagaaaaggcgctggatattaccgtgattcgtttgcctcatattgctaattttactgactttaatgcgctggcggtgcaaccggatgttcgcttgcgttatgtgactcaaccatccgcgttgcagccgtcggatttgatcatcttgcccggtagcaaaaacacattgggagatttgcaatggctgagacagaacgggttagcggatgccttgttaacggcacatcaggctggtgttcctgttatcggtatctgcggtggttatcaaatgctggggaaacggatcattgatggggtggagtcgggtattgaacagatggatggtctcggattgtcggatatggaaacccgctttgctcatgataaagtaacgactagggttaacggtaactgcttgctagcattaccccgctttgctgtcatagtgcgttgcgcagcctattcgcggttatgaaattgatatgggccgctcattactgggagccgatgcccctctcgctatcgatattaccgagccgtacggtcactctggcgcgtgcctgtatggttgcgcccacctattaccgcaacgcgatggcta

SEQ ID NO: 5714 - DNA, 708 bp, Photorhabdus luminescens
  misc_feature (565)..(565): n is a, c, g, or t
  misc_feature (658)..(658): n is a, c, g, or t
  misc_feature (708)..(708): n is a, c, g, or t
aagctttggtcaacgcaatgttgccagatgcagtacagagaggatagtttgaagcgcaattttttgctgtcaaatcatgtgggattacaggagtagggattaatgtctaataacctggcttatcactatttgccggaagaggtccataagtggccgggattaccactttcgttaagtggtgaagaagtgatgccgttggattaccgagcgggtgacagtggttggttgatatatggccgtggcctggataaacaacgtattagtaattttcaacatcggcttggcgctgctattgtcatcgtttcttcatggcgtattgatgattatcaggtagtacgtattgccggaaatttgactgctcgtattaaacggctagctgatgagtgtcggttagatgtggttcccttggggcagatcccacggttgcggtcaccaggtttgctggtgatggatatggattcaacagcaattcaaattgaatgtattgatgaaattgcccgtttggctggcgtaggtgacaaagtggccgaaattactgagcgggcatgcaaggagagttggattnttctgatagtctgcgagagcgagttgctcagttggcaggggctgatgctgatattctgcgacaggttgtagaaaatttaccacttatgctcgngctgaccagtctggtgcgtaagtacaatcccttgattggcatgtggcctn

SEQ ID NO: 5715 - DNA, 677 bp, Photorhabdus luminescens
  misc_feature (523)..(523): n is a, c, g, or t
tgggcaagggtaattcctcacccagaatctgctccacactctctttaaatttcgctggatgcgccgtaccaagaaataatccgtattcaccttcttgtaattgatcacgcaagacacgataagccaccgcggcatgaggttcagagatataaccgtgtttagccagttccttaatcgtttctttagtcacgtcatcattgactacaccatatcccaattcgctcaatggccaggatttacggtggaacagttcttcaatacgtggccagttgtttggctggctcacatccattgcgttggaaagcgtggcaacggtctgatgaggcaaccattttccatcctctagataacgaggaactgtatcgttaacattcgtggcagcgataaagcgttttaccggcaatcccatcgattttgccaataaacccgcggttaaatcaccaaaattcccactcggtacagaaataaccagttgttcacgctgatcttccggtagctgagcaaccgcttcaagtaatagcanatttgtgccaacaagcggctgatgttaattgagttagctgaattgagatacagagcctgtttcaactcctgatcatcaaacgcctgtttaaccaacgcctggcaatcatcgaaatcgccatcaatcgccaccgtgtgaatattaccacccaatg

SEQ ID NO: 5716 - DNA, 706 bp, Photorhabdus luminescens
  misc_feature (701)..(701): n is a, c, g, or t
aagctttggagtggggaatgttccgtggggaagggcaggagacaaattacactccagatgtcagtttgggcaatcaggggcgtcatacgccgttgcctactgagtctggcgcaccagaattgaatcgtgtttttcacgagggtcttgctgcattgcgtgaatgtcggccttttgaacagggagctgcattctttcttttcggggcgctacagcaatttttctttgatggtaacaaacgcacttcacgtttcatgatgaacggtatcttgatgtcgaacggcatcgatgcaatcagtgtgcctgcggcaaaactgtatgagttcaacgaaaaaatggtccgcttctacctgagcaaagatgctactgagatgatgatgtttcttatggattgtcatccggataaagtggcaaatctcggtttttttaaatgatcataaaatgggattgcccaaacgaacgtttttggcacgaccccgaccactattgatctttctgttaaaacaaagtgcaggataaaaaaaccagcactttgttaataatctgaaattaacgcaacaaaattttggatagtttgggtttacaaccccgacactgaaaccttattttgaaattgatctaaagtttataccctatggatttcaagatgcatcgcggcggcaagggagagaatccccgggagcatagataacgatgtgaccggngtgag

SEQ ID NO: 5717 - DNA, 666 bp, Photorhabdus luminescens
attatcgggaaaaacttccacaggaaaatctgaatggggtgcttgtttcagacagaattgccaatgagtcagctccgacattaattgatcataaacctcatcatcgatctcgctgatccctttctgacgatagagctgatcccagtgcgccatctgttgcatcaagctgttagtttcacgttgtaatttgtcctgcgaccattcggggcaattcttttctgtattcgaaacaaaaatttcagccgcaactatcggtgaactgaaaacaatgaacagaattaatatcaataaattaagcatccgttgctccttggctatccatgcataacaacaaaatagaggataaagagatgctgtccaaggcagagataataactttgcgaagcgcttcgaagaataactgcctgaaatcccaaggtagcgggctttttcatacactacacaaagcagatatttatggtgaaagcctgatgtatttaatatttgattcagggctgccatcaacgattcccgccccagaggttctcatcgaagacagaggtttaataaccgataaacttatcacatacgataagttcaagggtcgatattaaatatgccacccaaaattcaggctcgtatcctaaaaaggatctcagaccgctgacaacctcattgaaataatgg

SEQ ID NO: 5718 - DNA, 704 bp, Photorhabdus luminescens
aagcttattatggaggctcacttgtagggaatgcactttcctcacttcgtgaacacatgccgcatattaataccagagttgcagcaatattccgtcaggatcgaccaataagacctcaaggttctacaattattgaagccggtgacgaagttttctttgtagctgcatcacaacatattcgtgctgtaatgagtgagcttcaacgtttagaaaaaccctacaaacgtattatgattgtaggtggcggtaatgtgggagcaggcctcgcactacgtctagaaaaagattacagggttaaattaattgaacgaaatcagcaaagagctatagaactagccgaattattacatgacaccattgttttctatggggatgcctccgatcaagagttattagctgaagaacatatagaacaagttgatgtatttattgctctaaccaacgatgacgaggcaaatatcatgtctgcaatgcttgccaaacgcatgggtgccaaaaaagccatagttctcattcaacgtagtgcatatgtcgatttagtacaaggtggtgtcattgatattgcaatctctccacaacaagcgacgatttccgctctgttaggtcatgttcgcaaagcagatattgtaagcgtttcctcattacgtcgtggagtggccgaagctatcgaagcgattgctcatggggatgaaaatacgtcaaag

SEQ ID NO: 5719 - DNA, 697 bp, Photorhabdus luminescens
  misc_feature (33)..(33): n is a, c, g, or t
  misc_feature (144)..(144): n is a, c, g, or t
  misc_feature (232)..(232): n is a, c, g, or t
gttgctgataaatcaacaacaggaatttcaaangggtaacattcattgcgatacgtaaagatatcataaaaaatgcgttctttgcctatgtctggtggtctaggataccttctgccattattccttgggctgaaggagcattantggcaactcgtgaagttgcttgcgtttgttgggctgatgtggggcaaagcccgtgaagaatttggaagggcgtggagcagaaagcttntgcgtctctggcgcgtcagaatgtcacgttgtggatctgcgtgaggaattcattaaagattatgtttatccggtactgaaaaccggtgctctgtatgaaggtagctatttgttgggcacttcaatggcacgccccattattgctaaagcacaggttgaattggcactgaaagtaggagcagatgcacttgctcatggtgcaacaggtaagggtaacgatcaggttcggtttgaaagcacttatacggcattagcccctcagctaaaagtagttgcaccgtggagagagtgggatttacgttcccgtgaagcgttgctggattatctgaaagcacgagatatttcaaccactgcaacattggagaaaatttacagccctgatgagaatgcgtggcatatctctaccgaaggtggcgtactggaaagcatttggaatgcatccaataaagattgttgggtgtggaca

SEQ ID NO: 5720 - DNA, 712 bp, Photorhabdus luminescens
aagcttatccgggcgccaaattcaaattgttgcggtacgggcaatttcatgcccaggatgatctttcaaagcaggataaaaaagttttttcactaacggttgctgttgaagataattgacgagttccaatgcattcttttgctgtaacaggacccgtggcgataaagtgcgcatgccacgcaacagcaggtagctatcaaacgccgcaccggttacaccaatattattcgcccaccaagcgagctccgttgcaacctcttcatcctttgcaataatagctccggcaatcacatcagaatgtccattaagatatttagtacaggaatgcacaaccagatctgcccccaacgccaaaggcttctgtagtacaggactcaggaaagtgttatcaacaatgactgtcgcacctacctcatgggaaagctggcatatatgagcaatatcgacaatacgcaataaaggattactgggtgtttcaatcaataccaactttggttttttggacaagacttgctttaatgcctgttcatcactctgatcgacaaaggccacttcataagcaccgcgtttagtctggctgtcaaataaacggtaactgccaccataacagtcatgaggcgcaacccacagatcgccaggttgaaggaaaaccatgcctaacaggtgaatagctgacattccactgctggtcatgatagcacccgctccccct

SEQ ID NO: 5721 - DNA, 679 bp, Photorhabdus luminescens
  misc_feature (48)..(48): n is a, c, g, or t
  misc_feature (94)..(94): n is a, c, g, or t
  misc_feature (126)..(126): n is a, c, g, or t
  misc_feature (239)..(240): n is a, c, g, or t
accagaagtctgtgttaccggccatgaagtggtagccaaataaccaancgtaagccgccgagtgggctgtcttcagcacgaacccaaccgcggngttggttaatcgcggtttcaacaatggctaanccaaggccagtgccgccggattcccgatcgcgggcttcgtctgtacggtagaaagggcggaatatgtgttcacggtcttccaggttgacgcccgggccgtcatcatcaacggnnatagtgatcccttgattatcggcgtgaaatgcgaccgcaatatggtggtgggagtagcgtaaggcattacgcacgatattttcaaaagcactgccaagtgctaatgggttgcagtaaattgcccaagaactcggaggtacggttgcttcaagggttttatccatctgttcagcttcgaagcgagcattgtcaagactatcgttccataaatctgacattttaatgttcactctcaacaggtcatttgtatgctgactgcgggagagtactaacagatcgataatcatgctgtctagccgctgggcttctgtctttatactctctagctctttatttccaccatgacggcggcgagataatgctgctgcaagctgtacccggggacaggcgtgcgtacttcatgggagatatcggaaagtaaccgctgtcgggccatacc

SEQ ID NO: 5722 - DNA, 706 bp, Photorhabdus luminescens
  misc_feature (6)..(6): n is a, c, g, or t
  misc_feature (8)..(8): n is a, c, g, or t
aagctngnggcaagcgaacctgagattttgtgagttgaaaagaacgtccgccttcacgtcctcttgctctggccgctgccagcccatgccggaaaagcaaagttgaccaatggaatggtgataccggctaataacaacgaacgccgcaacggggaatgtttcatatttggttctcgtaactcgtaatatagataataaaaaaacgcattatagagagaaaaaattaatgtcgcactatttttaataaaattttattatggcgatttttatcattataagtattgtgtttaatctgcgatataatgttaaataatctttaatttaatgcgatggtaattataaagttcgttgttaaatagaaagtcaatatattgtatttgtgaatttcttattaaagaaattatattaaacatctattctaatcaataaggtatttatagagaataacgggttttaattttctttttctaaccaattaagtgaatcagcgataagagttttttctcttaatttacatgttcatatttattttatgtgcactaaatggaattaaccaatctctttttataatgttatggactatagctcttcattaattagtcactttagaaactatcaacgatgataatagatatgtcagcgggttattctcactcgccagaccgcttagctataaacttgattattcattaaagttttgtaaaat

SEQ ID NO: 5723 - DNA, 677 bp, Photorhabdus luminescens
  misc_feature (19)..(19): n is a, c, g, or t
  misc_feature (227)..(227): n is a, c, g, or t
  misc_feature (232)..(232): n is a, c, g, or t
tgttttctccatgctggcncgcagggaagttgccttacgtaaatcaaaatccatcaacatgactgaggtaaaatcaccaatcagatcttgaacctctggatggaaaggttgccggttaaagaatgtcaggttgagagtaaacagcggatgacggctataccattccagagtatgagcaaacagcgtcagcagaccggcggaaggcgtcacaccccattgttgccagngttgnttaagcatttgccaatcagattgtgctaatcgaccttcataagtggtgaattgtggctgacgacgctgaggcaattgtggattcagcggcaatcttggtgccggaggcaacgaaggtaattggtgctgccaatatgcccatgatgcctgccactctttacttgcccgttgagcttggtccgccatcacatagtcacggaaagtaaacacctgcgggatcagtggcttctggtggtaagcgcgttgaagtcgtcctcatgattcggaaactctgtacgtcaaactgccacagatccaaattcatatgtaagcgacaccgtgcattcggcaaccgataaacagaaccttacacaggggccactgttctgccggcggaacctgttataaagcgtatgacgaccctgaaccgtgcctgtgggaagctgtttatccacatacgccattct

SEQ ID NO: 5724 - DNA, 762 bp, Photorhabdus luminescens
  misc_feature (7)..(7): n is a, c, g, or t
aagcttnaatggcgctttttgtttaacgtccgagatgtgcggccggctcattttataagagccggccatatttcattgcaggataatttgaaggagaatgataatgtcagattcattaaatgtatctattgttcgtcgcttttatgactctacgggtgatattgatgttcttcgccagattatggcgagtgatgttatttgggatgttactgaaggatctcggtatggtggggtttatgaaggaattgaagatatattgaataattcctttgtgccacttcttaatgatgttgatgaattccttgtagatggttctgaatattttgagtccaatgatcatgtcattcgttctgggctcctatttgcgacgggtgaaccgtggcaaacgattcctcgctcgtttcgttctatatggaccgtgccggacggccagctaccctaattacaacaaactcgcccttcgcttcaaattgagcgtcgctctccccatcattacatccccttttatccgctatacccccccccccttactgttccgcctttgtcctccgccgccaacccgccgacccgaatgttactcattcacccacccttctacctccacctttccttcgtgaccattccccccttcgctccccgtccctatcccatccctcccctcttccccctctccctttactgcctcccgtttcccctttttccctccccccccttgctcccacttccaccccctcccctttcccttttcaccttccttccgca

SEQ ID NO: 5725 - DNA, 708 bp, Photorhabdus luminescens
  misc_feature (336)..(336): n is a, c, g, or t
  misc_feature (603)..(603): n is a, c, g, or t
accgttcaatgtgttatcggtggggatgcgactgccggtcacgaccaccaaatcggcctctgctggattttctgttagtatctgcccgatttccgccgcagcggcactgaggattgttttcaccagataacttccggcaagtccgagtgaaggatcaacgataagcagcattttcatcatgcttctcctgctgttagctaaaagggttgtagatcgacgtgcgccattatcacggcaaatgggggatttctactctcgcggcccctcgcccaaaccggaggccaccgcttcaccaatggccgctatcgcctgcggcgcatcatcaccattggcagnaatgtgaagccgatggccttttttagcgcccaatgttctgattctcatcagactactgccgtttaccggttgaccggcaccatcatgattgatgagggtaattccactggaaaattgccggataacattgaccaacaccgcacctgggcgagatcgatagccatgttccttcgacaggatcaattcccccgctgaatatggcgcttctgccgcacgtgcggccgttgtccagtattgccaccactgtgcgcccatacttcttacagntaacctttccgctttatggcgttaataacatgttctttatgtggtcgctcccacttctgcggtggggtgcagtaatcccccccgtcatcaccatcacccctgctt

SEQ ID NO: 5726 - DNA, 727 bp, Photorhabdus luminescens
  misc_feature (4)..(4): n is a, c, g, or t
  misc_feature (6)..(6): n is a, c, g, or t
gagntnggcttgatagcttgtttatgttatcagggcgagagcctgaccaaatataacctggttttccacagttaccggctaatcctccactgaatgtataaagataatgtgcaggattgtcccaatccgctttaatttctgcgactttgacaatgccactattggtttccgcagaaaatgcagggatgctaatcataccaatgaaaataaatagcatagatatcaattttttcatattctactcctagttaataataaagaaaatttgacgcatttgaagtgtaaattatgcaaataatctttgcatcaacttcatattaatataataggttcctagcatgataaataatgccggaagttttttcattaaaattaattaattgatataaataacatcaacattgtttaaaataataaaaacctctacctataatggttcataatcaatccaccaattaattatattaaaaccaccaaaatgcattctcataacacactatttatatcaagataatttctgacgatgaacatgaaatgattaatcatctattcaaataacataacggccataaattatttacttgactaatatcttttaatatccgctttatctactccacactaagaaaaaaattttaaccaaatcacttctataacaaattcttttacgcactaagctatatatccctcgcgtatccattacatataccaatagctaatatcctat

SEQ ID NO: 5727 - DNA, 678 bp, Photorhabdus luminescens
  misc_feature (397)..(397): n is a, c, g, or t
  misc_feature (494)..(494): n is a, c, g, or t
tgctatggcaacggctgagccataactatgtcaatggtgttgaggtattgcgagaacttggccgccaacaaaatggtgaaactcaaagcagacaaccgctgacgccggtggttttcaccagcatgttaggaatggcgcaagaaggcgtcgccatcaaacaatcgatcactcagttactgggagacccggtttttgttctgagtcaaaccccgcaagtctggctggatcatcaagtcatggaagtagatggcgatctactgtttaactggtactgcatggatgatgtattagcaccgggggttattgaggcactgtttgccgcttataatgcgctgttagtgcaaatttgctgccagcctgactgcatagaacagtatgatcttcatatccccccttncggtcatacccgttatgacttctggccgcaccaccctgaattgactcaagctgaacaatatttggcggccatacctgaaatacggctggcagatatnacccaccgtaggatgacaccctaggttattacttctggctggtggcacaagaccatttgtcattatcgctgccagaacattagcgataaacccgataagttacccgtgcctgagttaactgaacacagggctttgagcgctctgggcagccattgaccagcagccgtatcttgcctgattagaa

SEQ ID NO: 5728 - DNA, 733 bp, Photorhabdus luminescens
  misc_feature (6)..(6): n is a, c, g, or t
  misc_feature (8)..(8): n is a, c, g, or t
  misc_feature (37)..(37): n is a, c, g, or t
  misc_feature (195)..(195): n is a, c, g, or t
  misc_feature (539)..(539): n is a, c, g, or t
aagctngnccggatggcgcatttgatttagcttaccnccattcattaccactgaaagatcttcttactcctacacaagaggaacaaacatccagagacggtattttccctaaagagtttggcccacaacaaatattaacttgtggccccatcactgaagaagattatcgccgagctttattggatttgcatagcnacgacaaaaatgatggctattttttctttaatgatgcccagcttattcgtgagcctgagaatcaacgctatacatactggtataaccaacaagaacggcaatacagtttcattattaaaaaccgatataacaattcaacacagttaaaattaacactgaggggaaactattggctttatttgctccctagccgggaaactgaaaaaattcaagataataaaattcaagctcaaaaaaagttggaaaattttctgagggacaatcgcaatttgggagagtcagtcagtaaaattatttggctggaacccatcgatctaccattgaagattgatattcaacttgangatgacgttaaagatatcactgatctatccgctaacggttatacaacggcagaacacaatggttcttgaaaaaccgggacgttataccaccccaagcgatgatagaaatgggttcccgtactgaagacatttctaatggccctatttacgagttgggtggacccccatggctttaattcacgactaccccaatt

SEQ ID NO: 5729 - DNA, 689 bp, Photorhabdus luminescens
ttaaccgttttcgtgttgtcccgcccggaaccgggatttgccatcaggtaaacctggaatacctgggtaaaacggtttggcatgaaatgcataacggacgagagttggcttatcctgataccttggttggtaccgattctcataccaccatgatcaatggtctcggtgttctaggatggggtgtgggcggtattgaagctgaagcggccatgttaggacaacctgtttccatgcttattcctgatgtggtgggttttaaacttaccggtaaattacgcgaaggaattactgcaacagaccttgtattgacagtgactcagatgctgcgtgcccatggtgtggtcgggaaatttgttgaattttatggagatgggctagctgatttgccgctggcagacagggcaaccattgccaatatgtcaccggaatatggcgcaacttggggcttcttcccggcatatggtattaccctgagctatatgcgattgacagggcctacagaaaagcagattgagctggtagaagttattgcaaatccacggattttggcgaattccggcgatcacccgcatttacccatacttttgaactggacattgtcaccgtggaaacacgccttctgacctaacactgcacaaaccgggggggtctatcgcaatacctgggggtttaacgctacgctgattaaa

SEQ ID NO: 5730 - DNA, 721 bp, Photorhabdus luminescens
aagctttattaagatgctagctgtgcaaactgaataacctagcaccatgaatattcccacgatagcttcatcgcgtttgcgattttggatggtagggttatggaggaatttgcctaattgccatagacacaatgcataacaaacgaccaaggtaattaacgcccataacgctataccatcagtggtgatacggattagccaaatctgtaatatcagcattacagtgagcaatgccgcgataatagcgacagctccttttctgccgaaaatagatgaataggtcggtatttcaagacgttcttcatctgggcctttacacttgcgtgtaatttcaaaactgaatccagagaaaaagcacaatcccatcaaaacccatattgggaaattgagtgtgaggttaggactggcgatattgcttaaccaccagataatgagtggcattaccagcatatgggaaatggcataccaagtaaggtgttgatttagccattcaccgataaagaattctttccccataagacaggtccagataaagaccaacagccaggcaaaagtaactgagcccatcccccgatctagaatagactccccctaattgtaatgcgatacacagataccagtacccgcaatctttagcgaataatacccgctgcaaatcgcctgcggatgatgcgacattccgccgtaatcttatgctctcgacttccgatttgaaaatagg

SEQ ID NO: 5731 - DNA, 696 bp, Photorhabdus luminescens
aatcttttacgtcgtaaaatcgagatatccaggatagggtttcttagccaaaaaccctatccctatggaccctctaatatctggctccatactagtaccactatttctaaaagctactgtcttctcttaaggagtaaataaatactcacagtaaggaacaataggcttggtaatagtgccgccaaaaccgctggcacgctgtacaccaagctcagtggaccaaagatctcattaagtacataaaataggaagccaaagctaatccctgttactatcctcactcccatcggcacactgcgcagtggtccgaagataaaagagagtgccatcaacatcatcactgcaactgaaagcggcgcaaatatttttttccacatattcagttgataacggcctgattcctgttcactctgcttaaggtatttgatgtactgatataagccactgatggaaagcgcttcaggctcaagtgcgactacattcaactgttctggcgtcaggagaattttccagtcagcagaaatacgttgtgatccggtgatttttttgctgtctggtcgatcagattcttccacctgagacagcttccataggtcgttatccttatcataaaccgccctggctgcatattctacagagagtagctctctatcatcattaaaatgacagatattgacccctttaatctcggtatca

SEQ ID NO: 5732 - DNA, 710 bp, Photorhabdus luminescens
  misc_feature (541)..(541): n is a, c, g, or t
aagctttactctccgattgaaaacgttattaaagcacttcattttgaaaaatagattaacggattaacggattaacggactcatattatcatttatctttctccccgaaaacataaccaaaccagtttttatttctctgcttccattaatggctttataattggcaggttttaaaccattattaaaagtcatttttttaaccgatgattttaattagcataaaactttaaccgttgtttttaccacttataacacttgctttttcactaactgcctatcccaatagagctattttatttgccattttgaacctgggcagtgctcaaaatcctcacgtactacgtgtacgctccggtttttccgcgctgtccgtgttcaaactgtctgcaacaattacgcctattgagataggctctaagtttaatcattatgagatatcgtactttacgtttacctaacgtaggttaccccggctttttatctttattaacactattttatagataattttaagcagtttttataaaatatcaccatttgntttttacataaattactgtagcggtctaataaaaccggagacccatttaggtggaaagattaccacgttaaaagaggtattcaatgacaagacaacgtcgtacgttttcttcagcggacagcagaactttactgggcatgatgcgtactctggggtaccaatggggcgt

SEQ ID NO: 5733 - DNA, 675 bp, Photorhabdus luminescens
aaaccgctactatgatcccgtgaatgtggcgcttgcagggctaaatgctcaggatatttttgggctgcatcgacaattggctgacaaatatttgtcatgcgatcctcctgtaataaagcgcatattgatgcttggtggcagcaggtgtattgaaaagccgtttggcagttttgagcgatgtattatcttcacgcatcatggcccctcctagacgagggtgaatacgtctggcactctgttcaaatgagtggtacagcatgttgtacagccggctgccccggtattgcggtgcgactgccacggttttcagcaacccaatggtgggctgaccgttttgcaggactgacagactcaaaattatcccggcaatttcgccactaggagttttagccagaaatgacgcagggtaatggcaaaaaggtttgataaactcctcaccgcaatgctgctgaaatgcgggccaagatggcgtggcataagcgaaattctcaccaaacaccgagtcgataaaagaatagagtttaacctgttcttgcatccataattctggcgtaagcgcaataatgtcgctctgacctcaggaagtctttgcgcacgttgatgagcctgctgaaagttgtcttctgttgcttgggtatcgccaatattgaggtatagcgatagcggatatcaaat

SEQ ID NO: 5734 - DNA, 706 bp, Photorhabdus luminescens
aagcttccctgatcttctttgggagccaacgcatgaggtaatataatgaacaaaatgattacaccagctaacgtagttgcccataaccatagtgggaaatttccagttttcactagccggattaaaacacgctcatagctgcgacggaggcgagcaaacattttttccactcgtatcaccatcagtgaatgttgatgatttgttgatagcatacgtgcgcacatgacgggagttaagctaagtgctaatatcccagagataatgacagctccggcaagagtcactgcaaattcagaaaacagctttcctacaattccaccaataaatgctaatggtaaatatacgattgctagagttaaagtcatggtgactagagatgtagcaatttcattccctccttttaacgcagcctgataaggagtatctcccattcgcattcgatgtagagcaatgtctaacacaattatggcatcatcgactaccagccctgtggctagaaccattgctagcaaggtcagtgtattaattgaaaaaccacacaaatgaataactaagcacacaccaatcaaagagagtggaatagcaataactgggatcacaacagctcgtaatgttcctgctcccaaaaatattactagggtaacagcacagcaagtaagtaaaatagtgataaaaacttcatgtaccgcaccaccaatatattcac

SEQ ID NO: 5735 - DNA, 666 bp, Photorhabdus luminescens
  misc_feature (500)..(500): n is a, c, g, or t
accctgttgccagctattttcctgtcccttaaccccttgcaactgggcacgggcaaacgtcacatccgcagacagtgcgcctaatgcccccagtgacacgcccgagccgaatacacctgactgataattgcccgcggccagccccccgccatacagagtgatattgtgtggcaaaccatagatcaggctgcccagcgcaaataccggggaacggctgccatcagtgaggttgccgccgtgatattgaccggccgtcaactcatatttaatgccaccgggacgctgcatcatcgggacagatgaagaggcgagggtcgagacacgggaactgccatcttcctctttgaccgtgaccgtcaagtcgccagaatccccggtggtgtacaggtcggtaaaacgaaatggtcccggcgctaccgtggtttgatacacggtataaccattctgggataccgtcacctgcgcattggagctcgccacaccggttatctccggggcanaaccgcgctgactttcaggccacatagcctcctcagaaaccaatttcatgccacgcaacgggatgctgtaaaaatatccccaccggtatagatttcacccgccgtaaactcactgcgcagtgattgcacatcacgttgcagataggtattactcacctgccattga

SEQ ID NO: 5736 - DNA, 696 bp, Photorhabdus luminescens
tcagaatgtacctgttgttggtgaacgtgtttatattccagatcacaaagtatactttgcgtcctttgataacaaagaaacagcatattatttgtgcggattattgaattcattaactgttcaggaatggattaacagccacaatgtatccattcaagttgcggatgtattcaaacatctatcattacctaattttgatattactaacacgatgcatactaaccttgcagagcttgttgaagaggctcatcagtgtcacgacaaaacagaacgccagaaaattatcaagcgaataaaatcggtcgcggaggatgttttgatcacctggagtgtaacgctcgtagaataactgacaaagataagttggctattatggcaaacatccttaactggcctgattatatcgtcctgtctgtctccgaactggagcatgattaccgggtacatgtagggacggccaacccacctactcactgcatccactgcaagcatcctgaaatcgttggctttggccgtcgtgatgaggtgatcatggatactcctgtcaatggcaagcggacagggattatactgaatcgccgccgctaccgttgtcaaatatgttgtaagacgtttatggaaccagtaccacacaaggatggtaagcggcaaatgactcaccgtttgatccaatacattgagcgtgagagtctacgg

SEQ ID NO: 5737 - DNA, 674 bp, Photorhabdus luminescens
  misc_feature (211)..(211): n is a, c, g, or t
  misc_feature (337)..(337): n is a, c, g, or t
attcaacttcgttacgtgtgactatgacggaaattcttgatcgtcacccatcccccggtcgtgatcgcagtgaggatctttattttggtgtgctaagtttccccgtagagagccacattatttactaccgggaagttccgacgggtattgaagtgttggcggtgttgcatcaaacgcaagatccacataatcatctataccctatggattncaagacgcatcgtaacctgatgggagcaaatgcccggtagcatatagaacgatgtgaccgtagtgagcgagtgcagccgacaactaggcaagtgggtatatgacagctatatactggacagcatanagcggggtatactccatataatcttcgataaactgagcacctgaacttttgaatcatatgctcgacagagttacccgagcctcgttactattagaaaaacgagttgactatctgttccgttactgctttgaacatagtgctggctggaggaccctgaatagccgattcgcgccacaatagaaattgacaaaacccctcaagtatcaccgttccatctgcttacgaaatagaatggatcttagcagtactcttgttaaatgtccccaacttcagctggatgacctacataatgtttggagctcgtcccaaaaacctgacggatgagcctcactttctt

SEQ ID NO: 5738 - DNA, 705 bp, Photorhabdus luminescens
aagcttatccgcagagttttttcctggatgatttcaatgcctgatttttgctggtgcgttaaactccagatgttttttactgcttgattcaaagtttttacactaatttctggataagtgatagttttctgagggaaagtaatgacttcagtcattttaagactcctttttttctataatcctatgtaatacggggaacgattagttatagcgatgtttgtattctttcaatgcttcatcgaaaaccctgactaattgtttagcggaaccttccacctctttccaagggtttatgacttgctggaatttagttataaaagaggtcaagttgagtgcatcgttaatttgggtgaatttatctttagaagcattaatctgggtcagcatggattgccacatgtaatccaaatggttcagagccacttctgcatccaataagcgggtatcaatgtcgctaaaatcaagggataaactagtaatagatttttgtaatgcgcgtttacctttgatgctctcttccaggctgcgtacttcttcgatcagcatgtttttacgttttcgtacttcttctgccttggaaccaaaaatgccgccagtaatagcgaggccgatcagtccccctacgataccggagaaagccaagcctacgaatttatcgtagtctttcttgagttggacaatttcctcttttttctccatgatctt

SEQ ID NO: 5739 - DNA, 706 bp, Photorhabdus luminescens
  misc_feature (693)..(693): n is a, c, g, or t
aagcttttcggcaagcccggataatttaagtccgtttttatccgcgaattgtaaaaattattcttattaagatagcagttttatttaaatctcagtaattattatcagtaattctaattttattaattgcattttaaccatctaaaacaataattattttataacagtaaataaattatccatattgcatttaacttggtcaggtaatatctgattttgttttaaggtatattagttaaaaaagtttaaaaataaataaccagttccttaatatacaatgagctggttataatgtttattattttgttatttatagtgtgccgctattataatttttagggatgcgtaatttatttatttatttatttatttatttatttatttatttatttatttatttattgtatgaattactggattaatgtttttatagtttataactatatttttaaatgtagcaatatattatttgcatattttcaataaattttttttcagaaataaaatcttattttatgacggaaaacttaaacattatttattaaatcgacttgtttttatgagttgtgtttttatttgccagattagactaataggtgtattttcatgaggattatacccgttatctttcaagttgcctctttgttggctgcactcactcaccccggtcacatagttatctatgctcccggngattcgctccctt

SEQ ID NO: 5740 - DNA, 675 bp, Photorhabdus luminescens
agacaacccgacattgcctctttcacttcgtgagaaaagtcatactccccacgccatgcctgccaactattgtgagtcttctcaatcaacccacgcaaacttggtcgtttttgttctaatccctgtttcagtaacgtcggatctaccccctgttcagttaaaagacgcagccattcacgcaccagtgtcgcgcgtcctttcggtgaatggatacgttgctgactcactttcattgatggacacatcgggctttttacatcgaaattaaaacagagcccattcccattacactccatagcaccacggaatgtattcctgacatttatcggaattgtccgatcatacgttcctcgcttaacagcatcgactttcatcataggggcatcaacccccatcggcggacaaattttgcccggattcaaacggttatccgggtcaaaggcagccttaattcggcgtaattcttcatacaagatgctaccgaaaaatgccgggctgtattcagctcgaaatcctttaccatgctctccccacaacaaaccaccataacgtgcggtgagactgacaatttcatcagaaatctgtttcatcagtatctcttgctgaggatcacacatatccagcgccggccgaacatgcagcacccccgcatccacatgaccaaacataccgtaa

SEQ ID NO: 5741 - DNA, 766 bp, Photorhabdus luminescens
aagcttttagggcctatatgtatagtaattctgctttagtcaaagattatgaggaaatgcttaatgctaagcgtttcccaataaagattgcgttatacattggcgaaagaatcactgttaccgcagatgcaccattgcttgttgaagataaagatgattatggcgaacccgttgtcttggtatatgaccagataatcattgaaccgggaggtcaaattatttaccgcactaatggtaagatcgaagctaatactattgtagggaacagcaataatgataaaaagcagagcattatcagtaaaggctctgatggaggcgatggttttgagggtgaacagggaagtaatggggttaatggcagcaatggtaatattggttcagagaataaacatggttgctctgttaaatccacaccaggtactgatgcaactggcggttcttcgggagcaccacggatggatggcaaaagaggtggtcgtgcacatgacgtaattatcaatgttgacatctctactgccgacgccatgcggcttctatcggttgttagggtgcgaagggcgcatatggcgccattggcggcaatgcagggaatggcgaatacggacgagctgcacaaacaaatgttgcgctcattctgacgcacgggctgggctggcgcaatcgaagacatcgctttccgagtgttaccccgtgtctcgcgtaatattttctccattctcttccgttcattccctttacggcctgtccctcgagacatgtagccccc

SEQ ID NO: 5742 - DNA, 678 bp, Photorhabdus luminescens
tggcaaaatagttagcggaaaatcactaacgtcattaagtaactgctgagcttgtaaaaagatagggatgtcatgacaatagggaatattattacccatctctccttttttatatgcatgcagaatttctaaataacgatacatcttggcttgctcaaaacgcacaccatttgcatcaaaaaatttgatcacaacatcaatttgaggaaacttatcttgaaagtattcagaattccattgccttatcgctggccagtcttgcaataaacctcggtaaacaattgcgtatccccgagcaagtgtgtgatgaaattcaagctgattaaacttagtaagttctactacacggctcataattctacacttctagctaataattgctgctagccgataccctttgacattcactttcccagttattactatttctcgattttaaactggcgagagcctgttctataatcctcaatccttctacaagtgtggcttcatcaatacgtcaggcacgcttcaatttcaacacttcatcattggggccaccaactccacaatcaaacattttcaaagaatgcttaaccaatattgtgtaatgaggaataaccatctctatcctgcatgatcccttccccttaactcgagtacaattcatggtaactcttatccacgagtcaagtgcgc

SEQ ID NO: 5743 - DNA, 770 bp, Photorhabdus luminescens
  misc_feature (5)..(5): n is a, c, g, or t
  misc_feature (10)..(10): n is a, c, g, or t
agctnaacancgtctatcaaaatgtattaaacagtgcgggtgcacaacaagcccggcaatatctggctcagcgggggcttagtgaagaaattatccaccgtttctcgattggtttcgcacctgctggttgggacaacaccttgaaacggtttgctcataatgaggaagatcgtcgacagttaaacgacgccggaatgttggtcgcaaatgataatggccgtacctatgaccgcttccgcgaacgaataatgtttccaatccgtgaccgtagagggcgcgtaattgcatttggtggacgtgttctgggagatgcactcccaaaatatctcaattcaccagagactgaaattttccataaaggccgccagctatatggcctctatgaagcacaacaaaatcacagtgacctttcacgattattagtagctgaaggctatatggatgtggtagcactggcccagtttggtatcgattatgcccctgcctaactaggtacttcgacttactaggaacatattgccctaactttttcgcgctactgatcaacgtatctgttgctactacggcgccagacccggccttgatgcatcctcggcggactctggaccacccgctccctcatctgaatgatgtcccgccttccactttcactttccttacccgatggctaccatcctgattcactttcccctaatgaacggcccgaatgctcctaaccacataccgccactcgtactacctttgccactctcttcgccattttccctaca

SEQ ID NO: 5744 - DNA, 682 bp, Photorhabdus luminescens
tcctgctgaggaaaggcattcagccaaagctgcaagcgcgttagtggcttattaatactggcattatgttcactgtagctgatgccttgacgggtagaaaatagtaaacattctcctttacgggctctgatatagttgccttcgctgtcacggtattctgcttcaccttgtagaataatattcaatatatccacatgtggataggatttaggttggaaagcggctttgggggcaatgacttcttgattgagtacacgtagcgcgccataacctaaaaactttgggtcaaaatagtgaccaaatgaaaatgtataacgagcttgtagccaaccatagtcagccttcccacattgttttgctggtctatttattatcataatggcgggtaccttacaaaaacacacacaaacaatagtaattatctggacggcgaaatgctacccagtcaatctggtcagcatattcaaatttcctgattgagaaaatatgaccaaagaacgaacgcttacactggaatctctcccggtcatggatgctattgaccggcggggaattttgctgccggcgctgagagcttgtacgtgcacttctgccttatcatacgatgcaaaattacaagagagctggatgtatgctgattaccgttcgttccataataatgaccatgccgtcgatgctgctg

SEQ ID NO: 5745 - DNA, 736 bp, Photorhabdus luminescens
  misc_feature (448)..(448): n is a, c, g, or t
  misc_feature (502)..(502): n is a, c, g, or t
  misc_feature (510)..(510): n is a, c, g, or t
  misc_feature (727)..(727): n is a, c, g, or t
aagcttcaatgagttgatttatttgacgcactgacttcggttggtgcgtttttcgaagtggctatttgggctttctgtagtaaggctagttgcaaggtaccatcatttaggccaaatacaatgttacattggcaaattataaaagttaatgatttctagtgtatgagaatgaatttatgcatactcgccgattttgttaacaaagtgaatgattaaccatggtagattcatataataagtacaatatcgctactctgtaaataaatatttccgagtaattcatttatcatgaaaataattttaatggtttcttagttacataaaaataggtgttattctaattggtttatttaataagtgctgaaattccgtttcataattatttgataaatgctaactttgattttatatttttgggataatagtaattgaatagaaaaaatagatnaataaagagtgagtgaaaataaatattcatataacttgagttcgtacatgattntatattanataataatttattgattttaaaagatagcttagcaagctggattaagagggtgtgatttggtggttttttgccctaatacaggcaacttaaaaagtaccgacagttcacaagaatcttcggcgtgctataccctatggatccgaagatgcatcccgactggcagggatatacgccccgggagcatatgtaacgatgcgacccgcgtgagccagtgancccacaagt

SEQ ID NO: 5746 - DNA, 682 bp, Photorhabdus luminescens
ttttatcccaatcagcccggccaacaccgataatccgggtttctgggtggatataacccgctttctcaagctgataaagggaaggcaataatttccggcgtgccaaatcccctttagcgccaaaaatgactaaatcacaagcctgagctgtagaagtaaccgccatatgtctctcctcgttgcgggatattgtaattttgttacagcattaaccgataatgtactcttttgaccatggcgcgtaaacagagataacgaataaccatcaccatgcgttaacaatatgtttctcatatgagaaaaatgtgataaatttatgtaattttccaacgtttatgaaagataattaccaatatgaaagttagacacttgtcatacttttatgaaaaacattaaattattgggacttcctactgccagcttcaatttgctaatagtatattttcataaaaatttacatagatttctcttctgaatgaaatcgtcaaaaaccacaggtaactgcgttttatgaatacactggaacgggtcccaaacagtatcgaatttttgagtaagtcagactaaaaagtggcgcagacaatcctggcttaccggaaactgaattcatacagtatcgcaacactgggcaaaatggcgaagtcagtgaaccacggttaaccggttttgccgccgtctgaat

SEQ ID NO: 5747 - DNA, 748 bp, Photorhabdus luminescens
  misc_feature (38)..(38): n is a, c, g, or t
  misc_feature (388)..(388): n is a, c, g, or t
  misc_feature (524)..(524): n is a, c, g, or t
aagctttgattagtattccacagtctgaaagaggtggngagattgctcaacgagggtttgactatcagacctgttgggctttgtctcaaatgttggaatatgaactggatggaaaaaactatgtatttatcttcgagtatcatgatgatgttctaatattagatgatgaatactctccaacagacctcacttttgctcaggtaaaaaccagtgaatcacattggactgcttatgatttacacaaaagcacaaagagaaaaccaatatctataattggcaagctatttattcaccatagaaacttttgtaactactcgcctcagctattgtttgtgactaatgcgtcatttaatttatgtgagaagaatggtggtaaatctttatttantgcaagtgaaataaaagatgagcataagattagcttcaaacaagcaatcaaagaccaagtgaagctcgatgatgaaaacattgatctttctatattgaagtttgttcaatcctcattaagcctagatgaccacatnacacacttaaaaggtatactgtgcgatttccttcgcaataaatgcggtgatgacactaccttatgtgtaaatgtgctaccagctttgcttgaaaaaaatgtccaaccaatctaacgcaaaatcagctgatatcgttgattctccacaccttatctctcgaaaacggtcctcatccccagccattactgccggtccagacctcatcgatgtcagccatcagatga

SEQ ID NO: 5748 - DNA, 686 bp, Photorhabdus luminescens
  misc_feature (576)..(576): n is a, c, g, or t
gttcaacccatcagaaatatgtcattatttttaatcctgtcaaccaacagtggctatcggtataatcccctttgccatatattcagcgcatttctcagggagataatcattttgaccatcaaaaaccacaactatcatatgacccgttttatcacgagcgcacctgatattcgccatctgcctcaagatatgggcattgaagtcgcgtttgccggtcgctcaaatgcaggtaaatctagcgctctgaatgctctgacgaaacagaaaagcctcgcccgcaccagtaaaacgccaggtcgaactcaactcatcaatttattcgaagtagaagaaggtattcgcctggttgacttaccgggttatggttatgccgaagtgccggaagagatgaaacgcaaatggcaaaaagcactgggtgaatatcctgcaaaacgtgaatgcctgatcggactggttgtactaatggatatccgtcacccattgaaagatcttgatcagcagatgatccaatgggcagttccaatgcaagtaccggttatggtgttgttgactaaagccgacaaactggcctctggngcccgtaaaagtcaacttgataaggtgcgtgaccctttgctcgcgctcactggggatatccagcccaatatttctcagttcccaaaaaatttgtatcgtaaactactcaa

SEQ ID NO: 5749 - DNA, 711 bp, Photorhabdus luminescens
aagcttgcggctcatcatgcatttttggcaccaggatggggctgcctttgatcaggcgaataccataaggtgatttcaatttcagaccatcgtcaaagaattctttaacccaagggccggtagcattaaccagaccttttgcacgccaagtataggtcttacctgtacgcagatcttcggcttcaaccatccaaccctcttgttcgcgccatgcacgggtcacttttgttcgggtacggacttccccgccacgttttttgacttcttgagcgttaaggacaactaaacgagcatcatcaacccagcagtcagaatattcaaagccacggaccaattctggtttcagaacagaattggcaccgaattttagccctttactgccaggcaggctgactcgtttgcccaaattgtcatagaggaacaggccaatgcggatcatccatgctggacgtaaatgtggctgatgcggcaggcggaaacgcatcggaaaagcgatgtgtggtgcaagattcagtaaaacttcacgttctgccagcgcttcactgaccaaacggaattcatagtgttctagatagcgtaagccaccgtggatcaattttgaactggaggatgatgtggctttggctaagtcttgtgcttccagcaatagaacagagagcccccggccagcagcatctgctgcaattcggcaccgctgatcccgccgccgac

SEQ ID NO: 5750 - DNA, 678 bp, Photorhabdus luminescens
  misc_feature (212)..(212): n is a, c, g, or t
  misc_feature (224)..(224): n is a, c, g, or t
attcaacttcgttacgtgtgactatgacggaaattcttgatcgtcacccatcccccggtcgtgatcgcagtgaggatctttattttggtgtgctaagtttccccgtagagagccacattatttactaccgggaagttccgacgggtattgaagtgttggcggtgttgcatcaaacgcaagatccacataatcatctataccctatggatttnacgatgcttcgngacggcaagggagctacattctgggagcttacagaacaatatgacccccgtgagcgaccgctaactactcagaggcatcttgaatggtcaggactatataatgaagactctaacccgccactcgccttattggattctctatttcaccggcatgcaaacttttcacgcatatgcttgccattttttctctatccacaattcggtcggagaacccagttgtacgaatatcccattctcgccctgtccacttcttgcctcgccgcgctccaacctttcctcctggtgcgacagtaccaggacaattccgctctcctttggccattcccttcctctatcgaccgccttccattttccgagctatttctggaactttgcacttcggaccacctgctgccaccatttcgacaccgacactccgtcgtgttgtcttcccttttacctttcgcttcccctt

SEQ ID NO: 5751 - DNA, 732 bp, Photorhabdus luminescens
aagcttctgtttgctgcggctaataattacatcctctccatcctgtataggtagaactatctggctatcgcaactgacttcataatcgttgctattttgggaaaatttcagcctgatgctgctttcactactgataaccagtgggcgggaagacaatgtatgtgggaacattggtaccaagacaattgcatccagatttggtgttagaattggccctcctgcggaaagcgagtaagctgtggaaccggttggcgttgcgataattagcccgtcagaacgttgggaaaaggcaaaacgttcatcgatatagacttcgaattcaatcatatgtgccactttccccggatggagtacgacttcgttgatagcggtactgatacgaggtttctggccgtttcttctgacttgagcttctagtaggaaacggtgttcgttccgatattcgccatccaatacttcagaaagtctgtgcaaagcattatcaggatctaagtcggtcagaaaacctagattgcctctgttaataccaatgactttaatgtcataacgggaaaggacccgggcagcgcccctcatattgccgtcgacaccaaccaccaccgctaaatcagcttgtttaacaatttctgtcataccgacctttgtgcatctttacaccaatgccttggctactcgacccccatcatgacagagtaaccttcgcatttacccatgatcaaactttcatgacta

SEQ ID NO: 5752 - DNA, 672 bp, Photorhabdus luminescens
  misc_feature (50)..(50): n is a, c, g, or t
  misc_feature (175)..(175): n is a, c, g, or t
ttgccagaatggcattttttgccaagtttctggttgaggctgagattcangaatatccccaaggttagaatgaacaggctctttttcaagtgcaaatgcaacccggctagcaatatccctatgcaatacttccgtcacatcaccgcgcaatgtgtcacggatcaagtggtaattntcccagtgtttctgcataacagaatctttagacaaaatactaacgacttcactatcaagagtttcgccatccatcagtgcggaaagtttttctctttgcatgccaaagtacccttcagtattgttccactatttttaattttaaatcagtggttgaatgttatcatcaatggcttcccttgcacggaagatgcgggaacgcaccgtacctaccgggcaattcataatggtagctatttcttcatagcttaacccatctaattccctcagcattattgctattcgcagatcttcgggaagagattcaatggtacggaataccacctgcctcaattcttctgacaacattaaattctgagggttcgaaatttcttttaatgcactcgaaatttataattttgtgcgtaactggcattcaatcactggatggcggaccgacccttgagcggtcagataattcttcgcagtatttactgccataccatacacccaagtata

SEQ ID NO: 5753 - DNA, 713 bp, Photorhabdus luminescens
aagctttagctgaagagacaggagggtgtgttgccgattcattggaaatggcacgttttggtaataatcatccggcctctactttattagttgccggtgtgcggtttatgggagaaaccgccaaaattctcaacccggaaaagcgtgttttaatgccaacgctggaagctgagtgttcgctagatcttggttgccctgaaaaagagttcacccagttttgtgatgaccatcctgatcgtaccgttgtggtttatgcaaatacatcagcagccgttaaagcacgagcagattgggttgtgacttcaagtattgctgttgaactgatcgattatctggatagtcagggaaagaagataatttgggcacccgaccgccacttggggaattatgtccgtaaacaaacaggagccgatattctgtgttggcagggggcttgtattgttcatgatgaatttaaaactcaggctttaataagggtaaaaggtctgcatcccgatgctgcggtattggttcatcctgaatcaccgcaagcggttattgatctggctgatgctgttggttcgaccagccaattaatcaaatcagcgcaatctttgccacatcagaaactgattgtggcaacggataaaggcatcttttataaaatgcaacaagcatgtcctgagaagcagttatttgcagcacctaccgctggagaaggggccagttgccga

SEQ ID NO: 5754 - DNA, 681 bp, Photorhabdus luminescens
catcatcaggaggcgaaccgggcagcagcggggccagtgggatcggatttttatagtgttgggaactgggctgataaagttttcgccatgcttcatcatactgcttttgctcttctgtgcggttatcgtcgacacgcatcaccccgaagcgagagcgggtcgcaatccggatataatctttttcttgatcctcactaagcttatcccccggaaatttcacctcaatcaacatttttaggttatcggggtgtacggagccatcaaagtaagtagcatttctacctggccaacggagaacttcgtctttaaccaaaataatatcgggccgacggatacgtttaacaccaaatttttctacatcgtcggcagaaggccgggcaaatgggttactggattgcggtaagttatcactataacgctgtttagaggccagactggtcgccagcatgggcagaggtacatctttaggccctcggatagcaaacaccacttctgctttatagggccccaggaagtcatgcttaagctcctccaccttaatcaacccactcataatgacttgattaagaaagcgaatagcgcccagtttggtgataatctttgccggcaggcgcagagcgtattcggcttttctcgccagataacagggatcttcattcgcaggaaagacccctatttcct

SEQ ID NO: 5755 - DNA, 710 bp, Photorhabdus luminescens
  misc_feature (686)..(686): n is a, c, g, or t
  misc_feature (699)..(699): n is a, c, g, or t
aagcttatcttcttctctatctaccgcctgtatcctgacatcaatgccgggataagctaaattaaagctggacagccttggaaccaaccactggatagcaaagctaggtgaaaggctaaccgtcaaagcacctttagcacttctagcttgaagtttacgtgttgcttcatttatcgccgtgaatatctctttaatgtccagatagtagctttgaccttcttcagtcaacaatagtgatcgattgcggcgacgaaataacttcaacccaagaaaatcctccagacttttcatctgatggctaactgcggcctgcgtcacaaataattcttctgccgccttagtaaaacttaaatggcgcgctgcggcatcaaaaacccgcaacgcattaagtggaggtaaacgtttggacatgtgagcccttatgtaatgttggagataccggtaactctttatatttagttattagtttttgtaatccgaatcattataaattgtccattgaggatacaccagtaaatccctatagtggcgccacttcctaagccggaacgaaaagtgaatcagcttaacgctatgaaacttttggctttgtggttgtgatgttgtgtttgcaagttgtctgggaaaccggaccctgtagctcaagctactgttttttcacttcctgtacatttaccctgtctgtncatagtgattttntaatgcaccgc

SEQ ID NO: 5756 - DNA, 655 bp, Photorhabdus luminescens
  misc_feature (312)..(312): n is a, c, g, or t
  misc_feature (560)..(560): n is a, c, g, or t
ctcgatatctttcctgacgacgagacgattgaactggcggaacaagagcgattggcagaggatttgcgtttactctatgtcgcattgacgcgttctgtttaccattgcagtgtcggcgtggctccgctgataaaaggcaataagaaaaaggccggggatactgatctgcatcaatgtgctctgggctacctgttgcaaaagggggtgaaaggggatgctgattttctggcaacatcgcttaaagaattaagcggagatggcattgttatatcatcaattaatgagactgatgatcacccttggcaatcgcanagtaaaaatgatttagtcctgtcggccaggcaatttaaacgtagagttcaggatgattggcgtattaccagttattctggtttacgaaactctgtagttcatcgtggtaatgcttccgcttattttgctggagaagaatctattgacgtgattgttcagtctattgcgccaaaacttgatgttgatgctagtggtgaaagacagttagtagaacaacctgaaatgacaccacatacattccccacggngagccttcgcggggacttttttacacgctattttggaagaacttagtttcagccaattacctgatgagaaatggttggcagaacaactgcaatag

SEQ ID NO: 5757 - DNA, 773 bp, Photorhabdus luminescens
  misc_feature (1)..(50): n is a, c, g, or t
  misc_feature (61)..(61): n is a, c, g, or t
nnnnnnnnnnnnnnnnnnnnnnnnnnnnnnnnnnnnnnnnnnnnnnnnnntgcaagcttgnttaaacagttgcaaagccgctaatgtgccatattcaaaataagtcagcgaaatatcaccgcgacgagattcaatatccgcaaatacacgacagaattcctgttcaggtaactctttaccctgaatacgaactctttcggtataacgtacaagatgcggagagctgtaaacacccactctcagcccagccgccaacagaatagattctatcgtgcaacaggtagtacctttaccattagtaccggatacggttatcaccttaggtgcaggattaaccaacgccaaagttcgggcaagtttccccacacgctcaagccccatatcaatggccgtagtatgcaggttcccaaggtaggaaagccacgtcatcaatggcgacgtggcttgaggaatttgtaaagtgtcaggcatcttctttattggtacttatttgaatatccgcctcaacatcagcgggttctgccacaaattcagcaacaattggcttagtacctggctgcgactgatgagttagtttagaaagtaaacttgcaagtgtgtcacgcatttcaggacgacgaacaatcatgtcaatcgctccctttgccagcaaaactcactacgcctggaaccggaccgtaatttttcacgaacagtctgctcaatcactcgtggcccggcaaaaccaatcatgcttttggtcagaatattgatataacccacatcgcagactt

SEQ ID NO: 5758 - DNA, 705 bp, Photorhabdus luminescens
  misc_feature (580)..(580): n is a, c, g, or t
  misc_feature (690)..(690): n is a, c, g, or t
  misc_feature (704)..(705): n is a, c, g, or t
aagcttccgttctgttattcctgtccggtgttatcagtgttgttatttacgctatcgtcaatagcccaagcatcggtctggttgaagaacctctgatgaacaccactcacgccattctgatcattatgttgagtgtcgcaactatcacaacgatgttctgttcagttgatactgacgccattctgaactccagtacctttaaagcgggtatgagcgcatgtatctgtattctaggtgttgcatggctaggagatacttttgttcaggcaaacatggattggattaaaggcaccgctggagacttaatccactctcaaccttggttgctagcgatcattttcttcttctgttccgccctgctctattctcaggcagccaccgcaaaagcgttgatgccgatggctttggctcttaacgtcacaccattgaccgccattgcctctttctcagcggtttctgggttgtttattctgcctacctatccaaccttggttgccgcagttcagatggatgacaccggcacgacccgtatcggccgttttgtatttaatcatccattctttatccctggcaccattgnggttgctctagctgttgccttcggtttcctattcggcagtatgatcctctaattctggctgccaataaccacttaatccaggggcgtatacccgcccctgactccctctnccaaacgatatatnn

SEQ ID NO: 5759 - DNA, 671 bp, Photorhabdus luminescens
  misc_feature (597)..(597): n is a, c, g, or t
  misc_feature (636)..(636): n is a, c, g, or t
  misc_feature (638)..(638): n is a, c, g, or t
aatctgtatttacgtctccagattggccaacattaaccactatcaaaaacttcagtaagatcgccgataaccgcaaattctatcaggaaatcaatgctgagacggcggatgggcgcaatctatttaaacactacagtgagcaaactttccaacttgccagtggtgcaacctatcctacgacttatactttgtccgaagcggatttctctactgatccggataaaaactacctacaggtttgtttgaacgttgtttgggatcattatgaccgaccatcagggagaaaaggggcctattcctgggtcagcaagtggtttaacgtgtatgttgagttgcaagatagcaaagctccggatgccattcctcgattgatttcccgttacgatagcaagcgtggtctggtgcaatatttagacttctggacctcatcattacctgcgaaaactcgtcttaacaccacctttgtgcgtactttgattgagaaggctaatctgggattggatagtttgctggattacaccttgcaggcagatccttctctggaggccgatctggtcactgacggcaaaagtgagccgatggactttgatggttcanacggtctctatttctgggagttattctttcacttgccgntnttagttgctacacgctttgccaacgaacagaaa

SEQ ID NO: 5760 - DNA, 702 bp, Photorhabdus luminescens
  misc_feature (638)..(638): n is a, c, g, or t
  misc_feature (672)..(672): n is a, c, g, or t
ccgcccaaggtattctactatgttcaaagaccgttgggatcacaagttgttgataacgttgctgatagatgggattacttcccaactcttccaatccagctctcagttcattaatcgacgaaatctgaaactgaggatactggcggccatagcgctgaatatcctgttcaatagtttgttgtacaaaaccagcaagttgacggatatccactcctattgcattcacaatgcagtagttatcatgcagatgacgaaccagtgactcgtcatcctttctatcaatattacgcataaacacagcagtccgtctcagcatagctaccagcttttcagcttgagtgctgataatcgtcgtgcaggggaacgcttcaaccgcccgaccttttcctgttagttgcgtgacaaatgaacgaatatcgcgccgttctgccgcttgcagcaaatcagactccatcaactccagtttgataaatggcctgaggtagggaacctgtacaacacgttggggatagcggaccgaaatatcattgtagcgatattcatcccgtgtgatcttagggttgctatcgtcaatccccaaaaaaccagatgctgcaatagccgctgatatcgtctgaacatatcctttctgatatttntgcgctgagatcgggagtactgaacacccaccanaaattcaggctgtggaaccagtttgtatcc

SEQ ID NO: 5761 - DNA, 688 bp, Photorhabdus luminescens
  misc_feature (688)..(688): n is a, c, g, or t
tttaaggcaatcaagggaacggtaaataacgcggcagaagctgttgctgatggcaatgctctgacgattcttgatcaggaaatccgggaagcaaaagcagaaatccgccgtgcggatgaaagcttggttagcatcattgctaagcgaaaaatggcagagaaaaaggttgcggatatcaaaaacagtatcaccgagtacgagggttatgctcgctctgctgcgggtaaaggcgataatgggcttgctttagagtgtgctcagaaagttgcgaccctgcgtgatgaactggaaagagaacaagggttgtttgaatcgttccagaaggctgaaacgacgcaccgacacactgtacaagaggcgaagaagaaggtgtctcagcttgagaaccaggttgatttggttaaggccactgagcaggtgcagaaagcccaagctgcgactcacagttctgtcgttggcgcttcttcaaaaacatctaccgcccttgattcccttgagcgtatcaagtcacgtcaggctgagaaagcggctcagttcgaggctcagcaggagctccacgatagtatgacttctagcgatctggataaaaagcttatagaggctggcataacgtcaagttctatgtccgcagaagatgaactggctcgtatccttggcaagaaatactcagttgttaaatcaagatccn

SEQ ID NO: 5762 - DNA, 712 bp, Photorhabdus luminescens
agcttagcctggaaaatcgcttcattataaatatccggagattggggtttgaatattatgagaggtataaggtagcaactcagatgctgcctctaataataaacgaatgatacgatcagaataaaatacaaactccgattgttcggctttacgattacgcgcttttgtatgcaaagaagtcaaatattgacttttcggcaaaacatgcacgtttttataattctccattataactccaactcatatttatagataaatgttattcagccgtacttggtctcaaataaacccgtgataattaacgtgcctatttagatcatcacatatcgattaaaagataaactctcatatccattctcttaatgcaataggccgaagctacagaatattttatatactactgctttattgtttaaatagttgtatttagcaacaaaatcaaaaataggttcttaaattcaagccatattttcagacttgtcttatttctctataaacctttatatggaaccctaatctgacttgtcagaaaaataaaaaatagacccgttatctttcaagttgcctctttgttggctgcgatgaccgaacattaaacctacataatgtaacaatttcttatagttaatatatacgataatacattttgccgaataaattgcagaaaactattatagctcttaccagaatcatcaagaaatgctaaagttga

SEQ ID NO: 5763 - DNA, 684 bp, Photorhabdus luminescens
  misc_feature (18)..(18): n is a, c, g, or t
  misc_feature (89)..(89): n is a, c, g, or t
  misc_feature (95)..(95): n is a, c, g, or t
  misc_feature (358)..(358): n is a, c, g, or t
  misc_feature (378)..(378): n is a, c, g, or t
taaatacattcttgccanaaaaattagattcagaattatggaagatattgagtgagcgtttggcgttctgcaatctggatgttaatcanaaagangactttgccaaattgaaggcaattcttaagcaggataatcggcctgcaatccattattttgcgatgccacccagtacttttggttcggtttgtcacggattgggccttgcagggctaaataaagagccaaatcgagttgtgatggaaaagcctttagggaccgatcttgaatcatccaaagccatcaatgatgaagtagctaaatatttcaatgagcgtcaggtttatcgcatcgatcattatctgggtaaagaaaccgtatngaatctgttggcgctgcggnttgccaattccttgtttgtgaataattgggataaccggacaattgatcatgtacaaattacagtagctgaagaagtcggtattgaaggccgttggggttattttgaccaagctgggcagatgcgcgatatgattcataatcacctgttgcaaatattgaccatgattgctatgtctcctccggcagatctgacgacagaccgtattcgtgatgaaaaagtcaaagtattgcgttctctgcgctgcattgatcataccaatgtgcgggagaagacggtacgaggtcaatacactgctgggtttgttc

SEQ ID NO: 5764 - DNA, 768 bp, Photorhabdus luminescens
  misc_feature (366)..(366): n is a, c, g, or t
aagcttgatcacggcgagggaaccaactttcttcttctgaagcgtaacgagctgcattaaggcctgccaagagtccttgagcagccgcttcttcataacccgtcgtgccgttgatttgtccagcaaaaaatagaccgtggataaatttactttctaatgtttgtttcagatctcttggatcgaagaaatcgtattctattgcataaccaggacgaataattcgagcattttccattcctttcatggagtgaacaatttgcatctgtacgtcaaacggtaagctggtagaaataccgtttggatagatttcattactagtcaatccttcaggttcaaggaagatctggtgggcatcacgatccgcanaacgcatgaccttatcttcgattgaagggcagtagcgaggaccgatcccttcaatgatccccgtatacatttgggctacgatctaaattattgcggatcacatcgcgggttttttattcctatgggtgatgtaacacgggatttgttgcggatgctgcttacattttccaggaaagagaatactggcgttggattatcacctagatgttgtggtagctgactaaaatcgatagctctggcctcataccttgggggggttcctgtcttaatctgttcacactaaaggcaattcacgtaagcgctgtgccaacgaaatggctgggggaccaccacctcttgcaccactctactgcgcacaccaatgtggatctctccgtccagaatgtccgtacagtgaaacaa

SEQ ID NO: 5765 - DNA, 686 bp, Photorhabdus luminescens
aaaaaataggtttgagttatttttcgtatcagctacttatagcgggttttaattattaacggatagataagagctggctaattttcttaaaagaacctgattatcacttaaattcagctcccataggcgtatacttaaaataagtctgtgtggaggtaaatgaaaatggctaaaaatcagattcaattccaaaaaggcatttctattcatgaggttatttcattatatggtcatgaagaacaatgccagaaacaggtgttcgatatgcgctggcctacggggtatcactgccctcattgtgggcatgataagtattgccagttaaaatctcgtctcctttatcagtgcaatcaatgccatcatcagacatctttgacgggcggcacattgttttctgcgtcaaaattacctttaactgtgtggtttttggcgatctatctcatgactcaagagaaaaatgggatttctgcacttgaattgtcacgtcaactgggcatttcctacaacgcgggattggcgtatgaaccccacgctaatgcaagcaatgaaagaacgggatgaccaaaagcctcctcggcggttttattcaccttgaccacgcatcctggggaggggctaacatggccccgagggcaggggcaaaaggaaatgcccttctttgcgaggttcatcaatgaaaggccccc

SEQ ID NO: 5766 - DNA, 722 bp, Photorhabdus luminescens
aagcttggcttaatagcttgttaatgttatcagcgcttgaacctgaccaaatataacctggttttccacagttaccggctaatcctccactgaatgtataaagataatgtgcaggattgtcccaatccgctttaatttctgcgactttgacaatgccactattggtttccgcagaaaatgcagggatgctaatcataccaatgaaaataaatagcatagatatcaattttttcatattctactcctagttaataataaagaaaatttgacgcatttgaagtgtaaattatgcaaataatctttgcatcaacttcatattaatataataggttcctagcatgataaataatgccggaagttttttcattaaaattaattaattgatataaataacatcaacattgtttaaaataataaaaacctctacctataatggttcataatcaattcaccaattaattatattaaaacaacaaacatccattctcataacaaactatttatatcaagataatcctgacgatgaagatgaaatgattaatcatctattcaaataaaataaccggcgataaattatttacttgataaatatcttttaatatcgtcttatctactcgacactaagaaaaaaaatttttaacaaatcactcctattcataaatctttctacgtacaagatatatatttctggcgtatcccattccactatattaaatcgccaa

SEQ ID NO: 5767 - DNA, 727 bp, Photorhabdus luminescens
aagcttggccaaggagaagtgttcttatgagtaaacaactggtggttgatggcgacactttgctattcgaacccttgttcggtaaccggcaggtcactattctggggccggcaatcgtccggggcagtggtcacgttaagatccaaggcaaaaaaatcgtaatggtgggggatgaaaaaaagatacagcttcaagcacaatatattactcctagccatccaatacccggcatgggtatggtcaccattgctcaattggatgtcggtcagcaggtaaatttttgtcgtagccctgccacggtgattgtggttggacagcaattcattgcccgttttaccccatcacagccggcaaataatccatcgagtggccccgatataaccgcacccagtatgggaaaaggccgatttattgccagtcaatatgctgtcagtgctggataaataatgccctaatttatttttaaatagcaatgatctgctgaaaaaatattaaagttatattccaataaacaggcggcataaatatggaacagaccgaattacaaataaactcaccgctatggatcggataccactttaaacttgatgaaagaagcacgcgggatatactaaactggattcaggaatatacggaacaaatcccttttgaacaggggaaagacaaattctggcatagcttctacttcattcaagaaaacatactcaggctcagcgatattaccaaa

SEQ ID NO: 5768 - DNA, 682 bp, Photorhabdus luminescens
cccctctctgacactaggctgcggctcttggggaggaaattccatctctgaaaatgtagggcccaaacatctcatcaataccaaaaccgtggcgaaaagagcagaaaatatgctgtggcataaacttccgaaatccatttacttccgtcgcggctccctgcctgtggcattagaagaagttgcaaccgacggtgcaaaacgcgcttttatcgtaacagaccgtttcttatttaatcatggttatgctgatcaagtcactgatgtgctgaaatcccacgggatagaaacagaagttttctttgaagttgaagcagaccctaccctaagcactgttcgtaagggtgcggaacaaatgcactcattcaaaccggacatcattattgctctggggggagggtccccaatggatgcggccaaattatgtgggtgatgtatgaacactctgaaacgcatttcgaagagctagctctacggtttatggatatcccgtaacgcatctatagattccccacaatgcgggttaaagcgaaaatggtcgccattaccacactttccgcacaggttctgaagtgacaccctttgcggttgtcactgatgacgccacccgccccaaatatcccactggctgattatgaattgacgcctactatagctatcgccgatgccaacttagcctggataa

SEQ ID NO: 5769 - DNA, 737 bp, Photorhabdus luminescens
aagcttatccgcagagttttttcctggatgatttcaatgcctgatttttgctggtgcgttaaactccagatgttttttactgcttgattcaaagtttttacactaatttctggataagtgatagttttctgagggaaagtaatgacttcagtcattttaagactcctttttttctataatcctatgtaatacggggaacgattagttatagcgatgtttgtattctttcaatgcttcatcgaaaaccctgactaattgtttagcggaaccttccacctctttccaagggtttatgacttgctggaatttagttataaaagaggtcaagttgagtgcatcgttaatttgggtgaatttatctttagaagcattaatctgggtcagcatggattgccacatgtaatccaaatggttcagagccacttctgcatgccataagcgggtatcaatgccgctaaaatgcagggataaactagtaatagattcttgtaatgcgcgtttaccttcgatgctctcttcccagctgtgtacttgttcgatcgcatgtttttaccgcctcgtacttcctatgccttggaacccaaaatgccgcgtgtataccgaggcccatcagtcccccttacataccggccaaagcccatcctaccacctaatcgtcccctctcctgatttgcccatctccccctcctctctgcctgatcttatcctccacatcttcgattgcgaccgaattctat

SEQ ID NO: 5770 - DNA, 671 bp, Photorhabdus luminescens
  misc_feature (492)..(492): n is a, c, g, or t
atgatatcgtcacctgtatggaaatgctggaacatgtcccagatccacaatcggtcgttcacgcttgtgctcagttggtgaaacccggcggacacgtctttttctctaccattaaccgcaacaaaaaagcctggcttatggcggtaatcggcgcggaatacatcctaaaaatggtaccgaagggaacccatgatgcgaagaaatttatccggccatcagagttgataggctggattgacagaacatccttgcgggaaaagcatattatcggcctacattataacccgctaacggataaatttagccttggtcacaatgtagacgtcaattatatgttacacagtcagtatgtctgacatattcatctgacagactaataaagcggcaaataaatcacattttcaggaatttttttactcattttttgccggtgtctttgtcagagcaaccgctagtaatgatgcaggcttccggcttttaataaattctagncctaaagtttccacaagatcccgatttttgtacacttgataacagctgctttaacattatcttgttgcattattaactgtaccccctacatattggtccttacattccattaccctactttctcttggtttttccccctgagggggtatgtttcgtctaattaaagacacaagctgggg

SEQ ID NO: 5771 - DNA, 735 bp, Photorhabdus luminescens
  misc_feature (7)..(7): n is a, c, g, or t
  misc_feature (722)..(722): n is a, c, g, or t
aagcttnatcaggtttggagtcgttgtcatgcagattgttttcttcggcatacgccaaaacaacttgcctggcacgcccatcatctcgtgcagcatgattctcaagagtcactgatactaataagtaccaagccaacccgcggcggtacagaaatttttatctggagcgtagatcgtccttccttgtttgcggcggttgtcggcgaactggatagacgtaacctgagtgttcatcatgctcagatctttaccaatcgtgatggtatgacaatggacactttcgtggtactggaacccaatggtcatcctttagcatcagatcgccatgaaataatacgtaacgcacttttacaagttgttctagctccccataccaaaacaccgaaaacacgaaaattgccaaccaaactgcgtcacttcaacgtaccaacaaaagtcaccttcttacctacccataaccaacgaccaacctatatggaactatttgccctggatcaaccggggttgctggcaagggtcggtaatatttctcccccaaatggggggtccactgcctggggcccatatcaccaccatgggtgaacgggtccaatatcttttcgttctggtcgataaagaccataaagccttcgaatcaacagccgagacacgaatcatcccaaaggttgccagtacccctaatcccacgggtaaaacccaacttcatgtctcccctatggatncgacgatgcctcg

SEQ ID NO: 5772 - DNA, 677 bp, Photorhabdus luminescens
tccaattaaagtattctttcctggagagtaagccggataatatgccgtggcatatttctgaattttcagcatttaatgaagcacaaaaagctgctgcaaaactgtcaatacaatcttgggctgatgttgctaatattaatttcgttgaaaccactgacgccaaagaggcaaatgttacctttggattctttgatgttagcttgacggggagttatgcgtttgcttatctgccaacccccgagaagacacaggtaggaacttggtataacgcgaaaagccgtactttcttaaacaacgatattgacgtgaatggttatggccgtcagacgtttactcatgaaattggccacactctaagagtgcaacatccggctgattataatgcgtctgacaaggtatgcccgacttataagaaccaggcgacttattttgaagatagccgtgcttatacccgcctgagttattttggtgagaaaataccggtccggactgtaaagggattcattctttccgcaccattacttaatcatatttcctgccttcaggccgtatacggcccgaataataccatccgtgctgaggacaccgatttggtttcatttccacacagaacgtgacttctataccggaaaagaccaaaccagcaattgttggtcacgtttgggatcccgggggaa

SEQ ID NO: 5773 - DNA, 718 bp, Photorhabdus luminescens
  misc_feature (549)..(549): n is a, c, g, or t
aagcttcacaagccggatataattttttcaattctgacataacatttcctttactggctaacaccaaatctggtatccgtcaaatgacgggtagagataactatcagaaaatgttatttcaattcactatagctaatcgtattttgctgacaatcaacgacaacacggtaatctttgtcacgcttagaaccacgaacagtcagcggaatttttaatatctctttatcgccagtgatattttccgcctttacccacaccactggtttagaagttcccaattgctttctatcttctgaccaatggttaatgcggttttgcagaaaatcacgctttacttgagcggcaatttgcgatttagttaaattgtcacaagaaataaatttatcaacacgtttgttctccgacacagcagatactgtgaatgaaacagtgagcaaaagtgcaacacctgataggccaactctgttaatgatatgacatgttttcatactacctcccgttaatatctcaaaataagagattaaatatggagctaacctaacatgtcangtaaaacaaatgtgtgattattgttaaataaataatctaattatgttcatttttcatcatcaaacaccacattaacctgctcttttcctcgatgccgctcacgaagttcttgtgcaatcaacgcaatcgctccggcactgctcatttcttcaccatcaattgctgactt

SEQ ID NO: 5774 - DNA, 729 bp, Photorhabdus luminescens
aagcttctctggcaaaacacgataatcaagctatgttcgctaatctggaaaacccgctacccgttgcccgttatcactctctcacaggtagccgaattccatctgaactgactatttctgcccgttgtggcgacaccgtgatggcagttcgccacgataaacataaagtttgtggatttcaatttcacccagaatcgattctcacaactcatggcgctaaattgcttgaacaaactctggtttgggcactaaattaaaagggagatgaaaatgcaagctattttcaacaaattgtttaatgcgcaaacactgacacaacaagaaagccagcaactatttgccgccattattcaaggagaattaagtgaaccacaactcgctgctgtacttatcagcatgaaattacgaggtgaacaaccacaggagattgccggtgcagcccaagcattattggcaaatgcactgccattcccacggccagattacactttctgcgatatcgttggaacgggcggtgatggtgccaacagtatcaatatttcaaccgccagtgcctttgtcgcctcggcttgccagattaaaattgccaaacatggtaaccgcagcgtttccagcccatcaagttcttctgatctgctggcaacgcttggcatcggccttgacatccatcgcggacgcgcccttagtgcattggatgacctcggcatctgtttcctgtttgccccacct

SEQ ID NO: 5775 - DNA, 676 bp, Photorhabdus luminescens
  misc_feature (275)..(275): n is a, c, g, or t
tgtactatcttaccggcagtctcgccgcctgcgacaataaaggtattgaatcctagctggctcagaccttttacaacgctggcgaaggtgttttctattgcttcactggcagtagttgcaccatattgttgctggattttctgtaatgtttctgggaggtgagtggtgtatagcatcggtgccagatagttttcggattgctgaataacccacgcaaccagcttttcggcatattgtggatcattgatgcatgaatcaatattcagggctttagntggagcgaatttctggtatagagcaacttgtttgttggtcatgacggaacaactgccagaaaggatcacggtgcgtctattctcggcgggcggggttgctccttccggttggaatggcatcaatggcttaccggtgtctgtgctggcacgggcagcacccagaccacagtccacagtgataaactttaaccctgatgcccctctggcaatacgcagtacgctcttcatggagagggcatctcctattgcttaccgtccgttttgtcgtacgaaatgactcacccttacgccgatcgacctgctccctttgcggtaaccaaacccgatccaccataatctacttcgccttaacctcgcggatcatccagtacaccccacaggaatcggtaccctgggtcata

SEQ ID NO: 5776 - DNA, 707 bp, Photorhabdus luminescens
  misc_feature (610)..(610): n is a, c, g, or t
aagcttcctttttcgccccaatgttcgcacattgggattgataaatagcttgtttccctctttcaataaattaaattttgcattttcaaatatagcggaatttttctgctctaccttgacatcattccccaacgatttcagattaatgcctgaaatccgcggcactcttctgacacgctcacctgaactgttcgacgttggtatcaccctatcgtcagattgtcctttggcaaactttgaagtcgttaaaacgccggtattttccacgcgaatactggcatttatctgtagacgatcaaccgcttgtttagcatcatccaacgcttgtagctcttcttcggtcaatcctttgtagaattttttttcagcttccggtattaattcgggatcaatatagctaccggtttcccccgcgcctgtcgattcatagccattaccagacaaaccactaccaccggcaccggtacgatcaggttttgaatcgctctgttttgcccctctaacatcttcttgtacctgggcaattttattttcagccgcagcaatatcacgtttaccccgatattccgccccctgataggcgatatttgcatcattttccgccttttcngcccgttgttgttgcaataatgcttcttcttttcttaattctgcttttttctgagccgctgaatatcttgttttgcactggcatgatgctgttcact

SEQ ID NO: 5777 - DNA, 667 bp, Photorhabdus luminescens
tactgtccgcgggaagctggatgttcaaaataaccgctgtattcgtcaggtacagtggttttttgtttgatcaatttgtttgatcaaatagcactgagcgcaggcccttccttcagataggggataagtagttatcggagtgtgtaaacttgacgttaaacactccgaattttttgacattaagtggatgtcccgccgtaaccgaatagcggctggcgtagccagagggcggggagataccctcttgtatgatttaaagggatttttgatgggaaaagcatctaatagaagtgcagtgtacctctttacaggaagatattacgacgataatggcggtaatcgtattactgctgttggggctggtggtgaagtttatgcttatggcggaaatgatgatgttaccgttggttcatttaaagtcgatgtataccatacagatggcgaccttactgtaaagggagtgtcaggttatacctgtattcatacaacgggaaatggcgggctgtcatttacggaggctgccggtgtacctggtatcgatcaccacggtaaacgggaaatttaaattattcgggtgccggcggttataataaactggccgtaaagggttgcttggtgatactcgttttacaggggcccgtggatacaatcagttatggcatgaaaa

SEQ ID NO: 5778 - DNA, 712 bp, Photorhabdus luminescens
  misc_feature (618)..(618): n is a, c, g, or t
aagcttatcagggggacgaggtatataactttttcgatgatctactgccggataatccggaaatcagaagaagaattgttgccaggcacaatgctgaatcaacgcaaccttttgatctgctggctaaagttggccaagatagtgtaggtgctttgcaattggtaccgcaaggtacatccgctaatgatatcaagaggattgaatacaagcccttatccaaggtggaactagagaaagtgctaactggctaccaagctggtgcgccattggggatgatcgaagaagaggaagattttcgtatatccattgctggcgcacaggaaaagacagcgcttttaaatattgatggaaattggtgtttgccattaaatgccacgccgacaacacacatcattaaacttcccattggtaaaattgagagtcattcacattccattgatatgtctgaaagtgtggaaaatgaatatctgtgcatgttgattgccaggatgtttgggctgtctgttcctcactgcttaataatgaaagtgggagagataaaagcattagcggtagaacgatttgatcgcaagtactcatctgacaacagttggataatgcggctgcctcaggaagatntctgccaaaccttgagcgtggccttcgcgaaaagtatgagagtaatgggggccctgggattccgagatcatgtcctgcctcttgggttccggta

SEQ ID NO: 5779 - DNA, 669 bp, Photorhabdus luminescens
  misc_feature (366)..(366): n is a, c, g, or t
tatcatgaatgactcaaaactttcaggattggcaaaaacatgacactcatcagaaagcctgaatttattatcgttactaaccaacactcccatttcaactaagaaatcacataatcgactaaaccgagcataattaacaccagatttacgggaaagctcgcttatatcgacataaattccatctttaaagtgagtagataatccggtatcaacaaaagcatgaattgcagctgatcttctatttgatgcaattagttcagttagcattgagccatcctttttatctgtatacccgttatctttcaagttgcctctttgttggctgcactcactcaccccggtcacatcgttatctatgctcccggngattccctcccttgccgtcgcgaagcatcttgaaatccatagggtatatattatgaaaaaattaagtatcttatccacaatccaagaaataacatgatgatagattggatatcgcaacaatctgtttatacccgttatccttcaagttgcctctttggtggctgcactcgctcaccccggcacatcgttctctatgctcctggggattcgctcccttgccgtcgcgatccattttgaatccattggtataaaacaaatgaatcattaactttgtacttttcccgcaagatatatcactttgtt

SEQ ID NO: 5780 - DNA, 753 bp, Photorhabdus luminescens
aagctttggcggcactgcttcctcagaatgaatacagtcgtattgttgcaacttccgtggaaggtgaagtattacattgtagaggtgagttggctgatgcattagcgcggatgcaacaaaccgagcagcttgcgcgtcgttttcatgttcatcactatgcgttgtgggcgctgttgcagcaaagtgagatcttattagctcagggatatttgcagacggcttatgaaacgcagaataaggcatttgaattgatccgtgaacagcatttggagcagttgccaatgcatgaatttttgttgcgtatccgttcacagcttttgtggcgctggtctcgtcttgatgaagccgaagaggcggcacgtcgtgggctggaagtgttgtctaacttccaacctcaacagcagttgcaatgtttaacccagttggctaaatgctctttgaccagaggggatatcgataatgcccgccgctctccggcgcgctgtgaaaacctgctgagtaatgcgccgtatcctagacatcggtgtacgaatcctgatatgctgctagccatcatccggcctagaacggacgaccaaagcccccctttaccgtggtcggccccaacctgagcggtcataagttgtgacgcttattttcgtatgggactgcggtccatatcctcttcgctcatatcctgcttgttctcctcatgaaccttaatgcttccgcctccctgatacacttctacaaatgcccaaatccgatcttatt

SEQ ID NO: 5781 - DNA, 675 bp, Photorhabdus luminescens
  misc_feature (364)..(364): n is a, c, g, or t
  misc_feature (530)..(530): n is a, c, g, or t
tggtctatacagggtatcaaacgcctgcaacaaatttgtaaaaactacaacgtgagctgtagcagctcgcctaaaaaaattaactggaacaagctactaagtcgtgttgacatcatcccaacccattttgttgccactcaggccgcaacagaatctggttggggaacatctaagcttgcacaacagaataacaacttatttggtatgcgttgcggtaacaactgtaagaaaacccaaggtaaaataaaaggttattccgcctatccgactatcaatgattcggtcaaagcctatatgagaaatatgaacacccataacgcttatgaatcattgcgtgcttcacgcgccaagcagagaagccttnaggaatcactcaataccagcgaattgattgataatcctgaaggatattcacaattgggttcgacttacaacaactacctgcacaaagtatttaacagcaatacagggcttattactcaggcgcagaagttagctaaaaacgatcacgactaagagcctgagtagtnattaacacgaatatctggtgttagaatatttgtgctagtaccaaatcactcggtacataaccaatatggcacgaagattttttttgtacaccgtttattctcttctttgatgaatgttaggttaattctatatatccctcatctt

SEQ ID NO: 5782 - DNA, 771 bp, Photorhabdus luminescens
  misc_feature (38)..(38): n is a, c, g, or t
  misc_feature (334)..(334): n is a, c, g, or t
aagcttccaccataggttgaacttcatgggtatccagncgagaatttccctgttccagagcctgttgtatgcactgatgggcacgtgctgtgttagctgtgatgtttgctggtagtgcgggggtttctgttaattgtttctgattgcggcgatattcaaccatgtgcatgaaagcagtaatcgcgccttcaggggtgcgataagttggaatacctgcttcactgaacagacggcgggcttcttgtgaagagtattctccgcaccaattggtaaagatagttagccattttccccgtgggtgtttacggattgtttcaatgactttggttgcagnttgaatacagggagcaattgcgctaggagagtgaataagtaacagagcatcatggtcgtggctatctagtaacggttttaacgcagcgatataacgttccaccgcggagtcatccttaaatctagcgggtatgcacagagatacgttctgggagtcgcatttttaatgctttgccccgcctctccccctaatattgccagcttgtcgttacggccggataaccccatcacccgccattgccgctggacaagcaccatcgttacccacaattacccctacttccccctaaggcgacatatggtctaacctctataccgctaacaacacttcatgcgcatctttgcgccctaatacaccctgcttcccgaatagctctacccctaacccgatgccaattgtgttcgtccctcaccattatccgtgcttccctacaactg

SEQ ID NO: 5783 - DNA, 730 bp, Photorhabdus luminescens
  misc_feature (258)..(258): n is a, c, g, or t
aaaactccaaagcacaggatattgtttcccttgatgtccaagggaaatcaagtattaccgattgcatgatcgtctgtaccggaacttccagccgccatctgatgtctgtcgcagataatctggttgatgactgtcgtgcgagcggcctgatcccactcggcgttgaaggacaaggcgtatctgactggattgtcgtagacctcggtgaagttatcgtacatgtcatgcaagaagagagccgccgcatgtacgaactcnaaaagctctggagctgagtttgaagctgcaattaatcgctgtaggtacaaaaatgccggactggatacaggccggctttacagattatttgcgtcgttttcccaaagacatgccatttgatctgatagaaattccggccggcaaacggggcaaaaatgcctgatatttaaacgcattctcggaacaagacgggccaacaaattgctgggcccgttgtcagcaaagtgcagaccgtattcgccacccttggacatttcccggtctccccgtttgcgaaatcgccttcaattgggcgcatctcgtttcgaacatttggaaaccgggcatgtcagcagaatgtacgttctgttcgaacggtgaaccccaaagcgtttccctcccggcttgtaaaagctgcccgcaacacgcaaagctggctacctgtcgcccgctgacctttacccatccctttgtccccatatctagtttgcag

SEQ ID NO: 5784 - DNA, 674 bp, Photorhabdus luminescens
  misc_feature (109)..(109): n is a, c, g, or t
  misc_feature (195)..(195): n is a, c, g, or t
gcagcgatcatggaagggaggtttaaaccttccgaggatggtaatctggtgctctatattggcaacgtgcacggcaataagtttgaaaacgtattccttgctcaacttngccccgttgataaccagcgtccttccgtggtgatctctaatggcggtcatatggtggagcgacctgacggcaaacaggtggtcgtncttaatcatggtacgcgttatgaaggcactgcaatgctgcgtgattttaggatcactgagttccgtgattatcaagcgattattgggcatcacacttcaatcgtagataataataaagttgaacagaaatctattatccagttatggcacgataatgataaggactcccgtgctgagttccattggcgttcgactttggtgctctcagtactgattatggctatgatggtccgaccgttaagtgtggtgaacccacgtcaagggccggttattaatcattgttgcccgacatgtgccttatatgattttcttcttatcgaaagctacatgtgttctaacggtagacaaagcaattggaccccgtgatttggatgtggctcgataatggaccttattcgatgctgtccctggctgccataatatggaatacttgccggtccctagatccggctccttcactgtaaagattcgctttgttt

SEQ ID NO: 5785 - DNA, 711 bp, Photorhabdus luminescens
  misc_feature (572)..(572): n is a, c, g, or t
  misc_feature (711)..(711): n is a, c, g, or t
aagcttatatgaggaaattgcatgtctcgacgagggagaccccccaatttcgaccgggacatcgcactcaaacgtgcgatggaagtattttggtcaaaaggatatgaaggtacacagttagtcgatctcaccgcggctatggacatcaatccaccgagtttttatgcagccttcggaagtaaaaagaacgccttctgcaaagcagtcgacctctacattaagacgatcggtgtccagtcaatgcaagcactcaatgaagcaaaaacagcacgctcagggttgcgcgcgatgctggagagtaccatcaatatcgcctcttctcatcaagctggaggatgcctgcttgtcttgggtgttgtgaacaatctaacggaaaacaaagaagtatgggcttatctcagggatgcacgtaccaaaaccctagatatgatccgtgttcgcctggagcaaggaatcaccgacggtgatctcccacccaatacaaacgtggatgtgttggcgtcgtatctccttggtttgacccatactatttcattccaagctcgtgacggcgtacctcgtgaacgacttangcgcttgattgaacccgcaatggcagctattccaggcaactgattcgaataacgattatctccttatcacaaccgtggctatagaaactcagcatattaaagatgcctgtaagcaactacagtcacctttaccgtcagn

SEQ ID NO: 5786 - DNA, 678 bp, Photorhabdus luminescens
  misc_feature (489)..(489): n is a, c, g, or t
tccactattcatatcggatatgataacaaatatcatggcgaaacagtagaaatagatatcattttaaataatataatttacgagcacttagataaatcagaactcaaggtcactattatttcagaagacgattctgaatcacaatctgtcaatattaaagataaggtttccttactaattgatcctattgatggtactcataacttgcttatgggttatcctgcctatactacatcaatagctgtttacaagaataatagatatattatgggctgggtatatgatattccaagagatattatatataaagcatcattgggagaaggttcttatatacaaagcatatataccagtaagcgaatatatacaagcccctcatttcaactaaacgatttgagagtatcatttcatagggcgagaaataatcagtatacagaggttcagaataaaattattaatgaagcaaataaagtaagaatctcatcttgntcaagtttagatatatgcctgatcgctagtggcgttctacatgcattcttagatttatcacttatgggtcacgaacgttgtgtagatatagcagcagctaaactaatccttgaggagtcagggggatacataatgactcgcgatggaaatagctataatatcctatcacctacagattctttatttttt

SEQ ID NO: 5787 - DNA, 896 bp, Photorhabdus luminescens
  misc_feature (27)..(27): n is a, c, g, or t
aagcttacgctgaagaaatttttttcnatcaagagaaagaacagttctgggacagtttctactttattcaagagaataatcctcaacaactagcggacatttaccaaaatgtgaataaagccgatggtcgattaccccgcacatcaagcttttgttttggcttttttaacgttattagaaacatctaatcgatgattaaatacctttccggcccggaccgtaatctttattaccgggattattggggcttaaacccaaaaaaggccaggccattaatgtgggataggaatttcccttaattcccccaagcccagaattcttttaagtttaaaaccctcttttttgttgcggcgacaaaaacccccccgaaatactttcctctatgctcgcaaaatacaattttttggggcacccgcgggggacaccccccctttcttgggttggtaaaaaaaaataagggggggtttcttcgacccgcgctatcttttcttccaaaatatcgtccccccgaagaaaagtgttttcttctctttccccccccgcataaaagatgttttccgctcctttcctaccccacattactcctcctctttctttttttttgtgtgtccgactatgtctaactctttctcttctaccgcggtgggcgcggtttttatcgactaacgcgccgggcgtggcgtttcctatcaaaaatacaacattcacgtccgggtttacgccccatacccgttgcgccgttgcgtatttctcttatgcaatcgccctcctccctctccttcctcgttctttccacgcggcgttttccgcacttattcgttgaggggccccctcctctctccatcttcagtcctacctgcgcgcgtcatcctctttatttcgctttctcttccctt

SEQ ID NO: 5788 - DNA, 679 bp, Photorhabdus luminescens
  misc_feature (378)..(378): n is a, c, g, or t
atcggtggcagtaaattgtccccctttgagcgacagatattccagccagctgttaacacgaatataagaatcatcggttattaatgaattgtcttttgcgacggcaaagacaggtactgctgttgcaccggactgaacagagagtgcgggtgaggcgtcctcttcgatataaacgccgggataggttggtaccgttggcatgttgcctccaattattgtgcaatattctgagtagacagcttgataaatgaatcttaagccgcttgaatggtcactcgatctgcggtcagggtaatttcctgcacggcaacttcgttgctggtggcatcaaaagaaggagaaattaatgaggttgggaaggcatttgccacgctccangtcattaaaatttcagtgccggcttcgttggttaaactgattgaaatatcttttctctcaacctgattaagctgaatagagttaatccagtcaaaaagtctagcatccgcagagaatacccctttacgcagtgagatattaattcgcctgaccttgaccgggcatttttaagtaattgccggcaccatctttgcattctatgacatcatgagaaatgaccgaggccagaaacgctgctaaaagggatttgctcatcagcgatcgagacaacacatcgggaaataggaatggggaatccaaa

SEQ ID NO: 5789 - DNA, 731 bp, Photorhabdus luminescens
  misc_feature (419)..(419): n is a, c, g, or t
aagctttaggcttccccgttgtggcctgtctcttgatcagatctccaaatcaactgatttagccagcaaatagccgtctatcagggtttgcagccgaaaccagccttcccaaagtcgttcccatccgactcgacccgtgcgtttggaatcgtaccagccggccagttttcccagattgatgaaggcccaatgcaaactcggggcttttttcggcacacggcgtttttcttgttttgaccacagtaatttccacgccagggggcttaatactgtctcacagctctctttctctgcctcttctttgttcagacccataaaacgcagctggtgtattcgtaccgcaataaaggccagcagcactatcatgcgctccagattatctttgctttgcatacgcagcgcttctacctgcgtgccgncccgtttccacgctttgtgaaattcttctatcagacagcggcgctcgtaataactgaatattttatgggcgtcttcctgactgttgaccggttcccgaggtcacaatatgccagctaagcccatcctgcggacctttttcccaacacccgactacatattccgaccgtctcaacgcttttccttcgggatttttaaccgcacttgggcctagccgatatccaatgcacgacaacgcgcctgactcccgctttttgactgacctgacctatatgtttccccacttcgcaccggcttataagctctcaagtaat

SEQ ID NO: 5790 - DNA, 681 bp, Photorhabdus luminescens
  misc_feature (519)..(519): n is a, c, g, or t
ggttagctttagcatcagccaccacctgttcttgatatttcgaggaccacggcatgacccaaatgacattcactgccgctagcgcggaagttaacaacgccagaataagcgccgaaaccaccagcacacgcttgcccaaaccacacgcatgcataacagtaatttcactttcagtatagagtttactgaaagtcatcaataccccaagaaacagactcaggggcaaaatcaactgcgccatttcaggcacacctaatcctaacaaggataaaactaaatttgccgggacgtttccttccactgcggcacccaaaatttcgactaatctctgacagaaaaagatcagtaaaaggataaagagtatcgcaacttggcttttcagggtttcccgtaccagatatctaatgatgatcacgcttattacgcctgtgaaaacttgtctttttgcaggaaaatcgctaacttcattgtatatataccatttattatgtgcatcagtttggcttcctcactgctaanatgatatccaagccttccatattcaagttccccagtcgaacatacttataagttcagctaaataataccacatagttgcgtttagcttaacataaatagctaatgttctatgggcgagattaatgcggaacgctatattgtagcgatagcatccgtctttga

SEQ ID NO: 5791 - DNA, 703 bp, Photorhabdus luminescens
gagataatattgagcgggttgttggctgccatattttgaattcatttcattatgtattcgttcaatatttcgttgattaatagactgattaatttcttcatcagttaagttataatagatttttagatattctaacgttgccattaaagagggctgaatatcgtcaaagttttttttatagagtcttttaatttcctcttcgtcatctgtaattttatccgttaggatattaaatagttctggagagatggaaatattaatccccaatagggaagtttggtatttcagtttagcgatggttgtttctggggaagtattgaattgctcaaataccggagcctgtaactgaataaccttacgtacattttcgtaagcatcgtgatatggcagagagcccgaagagtgaaaggttgatagcgctttcatcacatgagtatggccttgctgtccggcctgcgtctgaatcccttccagcaacactttattggacagagaaagtgtagaaatttcatcatccatattttgctgactgagtatcagtgattctagatccgggcggcgtttatccagatgataaatggagctttctgcgtgtaaatcccgtgcctgacggtaaagttcagccgataagccccgggagagaacatggagcaactgcgtcgggggcgacatactggctggcacggacaccaatttactgtta

SEQ ID NO: 5792 - DNA, 676 bp, Photorhabdus luminescens
  misc_feature (15)..(15): n is a, c, g, or t
atatcaacgggcagngggttgatgccgacaatcaagcaacttttaaggtgactaacccagcaaatggtgaagtgattgcccacgtcagtaatatgggtgcggccgaaacagaacgcgcaattgcagccgctcaacaagccctaccagcctggagaaccatgacagccaaacaacgcagccagattctgcaacgttggtttcagttaatgatggcaaatcaaccggcactggctgaattgttgagccgggagcaagggaagtcacagacagaagcgatgggcgaaatcgcttatggtgccagcttcatcgagtggtttgcggaagagggtaaacgcacctacggtgaaaccattccaagcccattgcctggtcgccggattgtcacgatcaaacaacctattggcgttgtggcggccatcacaccgtggaacttccccaatgccatgatcacccgcaaggttggccctgctctggcagcaggctgcacggtgatcctaaaaccctgctcggaaaccccactttaccgtctggctctggctgcgctagcggaacaagccggtattcccgctggcgatttaatgtggtgaccggcatcgatgcgaaagccatcggcggaactatgacccaaagcccgattgttcgcaactctcttttactggctcaacccgtgtccgta

SEQ ID NO: 5793 - DNA, 705 bp, Photorhabdus luminescens
agcttgggagaaaaaggtattaaatatataaattaattttatacccgtcatctttcaagttgcctctttgttggctgcactcgctcaccccggtcacatcgttatctatgctcccggggattctctcccttgccgtcgcgatccatcttgaaatccagagggtatatatttaaatcgacttcgccaataaatataaataatagcaacgccagttattatgctggcgttggctattttatgagtgattattgataatcactgacaggtgcacaagagcaatgcagattacgatcaccgtaaacatcatcaaggcgtttaaccgcaggccaatatttattggctttggtttccaaggttgggaaaaccgcagtttcacggctgtaactatggctccagtcagaaaccagttcagcttgtacgtgaggcgcgttaaccaatgggttatcttctaatgaccactcaccttttgccactttgccaatttcagcacggatcgccagcatggcatccacaaagcgatcaatttccactttgctttctgattccgtgggttccaccatcagcgtgccggcaaccgggaatgacatggttggcgcatggaagccatagtcaatcaagcgcttggcatatccatctcactgataccaaactcttctttcaacggtcgaatatccagaatacattcatgtgccacataaccgttat

SEQ ID NO: 5794 - DNA, 699 bp, Photorhabdus luminescens
  misc_feature (4)..(4): n is a, c, g, or t
  misc_feature (10)..(11): n is a, c, g, or t
  misc_feature (63)..(64): n is a, c, g, or t
  misc_feature (80)..(81): n is a, c, g, or t
  misc_feature (96)..(96): n is a, c, g, or t
  misc_feature (120)..(121): n is a, c, g, or t
  misc_feature (147)..(147): n is a, c, g, or t
  misc_feature (154)..(154): n is a, c, g, or t
  misc_feature (696)..(696): n is a, c, g, or t
atanccattnngtggttccgacaaacctgtcctaatgaatcctgtaatgaaatttgccagatnnctggtttactatgacnncgaagctgaaaaaanttgaagcttatcattgaagatatnnccgcgaacgtaccggtaaagggcagnccggtanttggtggggactatttctattgaaaaatctgaactggtttcccgtgaactgactaacgcgggtatcgagcacaacgtacttaacgccaaatttcatgcaatggaagcggacattattgctcaggcaggtcaagcgagcgcggtaaccattgcgactaacatggcgggtcgtggtacagatattgtgctaggcggtagttggcaggcagaaattgctaagctgaccgagccaacagaagctcagattgaagagattaaagctgcatggcaggaacgtcatgatagggttctggcggcgggtggtttgcatattatcggtacggagcgtcatgaatctcgtcgtattgataatcagttacgcgggcgttccgggcgtcaaggggatgcgggatcatcccgtttctatttatcaatggaagactcactgatgcgtatttttgcctctgatcgtgtcactagcatgatgcgtaaactgggtatgaaaccgggtgaggcgattgaacatccgtgggtaaccaaagccattgccaatgctcaacgtanagt

SEQ ID NO: 5795 - DNA, 704 bp, Photorhabdus luminescens
aagcttattatcgggaaaaacttccacaggaaaatctgaatggggtgcttgtttcagacagaattgccaatgagtcagctccgacattaattgatcataaacctcatcatcgatctcgctgatccctttctgacgatagagctgatcccagtgcgccatctgttgcatcaagctgttagtttcacgttgtaatttgtcctgcgaccattcggggcaattcttttctgtattcgaaacaaaaatttcagccgcaactatcggtgaactgaaaacaatgaacagaattaatatcaataaattaagcatccgttgctccttggctatccatgcataacaacaaaatagaggataaagagatgctgtccaaggcagagataataactttgcgaagcgcttcgaagaataactgcctgaaatcccaaggtagcgggctttttcatacactacacaaagcagatatttatggtgaaagcctgatgtatttaatatttgattcagggctgccatcaacgattcccgccccagaggttctcatcgaagacagaggtttaataaccgataaacttatcacatacgataagttcaagggtcgatattaaatatgccacccaaaattcaggctcgtatcctaaaaaggatctcagaccgctgacaacctcattgaaaataatggggtctgttcttttcataatgaatcctaatac

SEQ ID NO: 5796 - DNA, 686 bp, Photorhabdus luminescens
cacttgctgcttttctgcggctttcattcggccatgtaccaacccgactttcagttccggtaaagcgagcgtcaattcttcactggtggcttgtgccgcttgagcttccagcacatcggaatcttcaatcagcgtacagacccaataggcttgtctgttttcatcaagacaggcgtttctgatccgtttgataatttcttcacggcgcgtatccgggatcgcaacggttgtgactggtgtcctccccggtggcaattcatcaataatagaagtatcgagatccgcataagcagtcatggctaaggtacggggaatcggggtggccgtcataatcaattggtgaggatgaaaaccctgttcacgtcctttttcccataaagccagacgttgatgcacaccaaaccgatgttgctcatcaataatcaccagcgccagaccggaaaacttcacttgttcctgaaacatggcatgcgtaccaacaatcatggcgacttgaccgttggcaatgggttcttggttgttctgacgtgctttccccttttgcttacctgccagccagccgacctgaatacccaaaggttccagccatcgccggaatgtatttgcatgctgttctgccagtagttcagtcggtgccatcaaggcgacctgtttaccatgtgcaatggcacgcaacgcagctaatg

SEQ ID NO: 5797 - DNA, 740 bp, Photorhabdus luminescens
aagcttgcacagcatgttgaatcatcacgcctgatatggtggatatggtgactttgagtgaaaaagagatcgcagttatttgccagcaagttgagggtggtgccggtaacatacaagatatttatccattatcacctttgcaggaaggcattttctttcaccatcgaatgaatggagagcacgatccttatattattccgattctgataaagttttctgatgagcaaaagttgacagcttttctccatgcgcttgataagatcgtagagcgtcatgatgttttccgtacttctattcattggcaggatttaaccacatcggttcaagtggtccatcgaacagcttctattccccttcattggcaagcggttattccaggtctttcggcgttggaaactgtgcaacaggcggcctttgaacgccattatatgaagctggatcgcgctcctatgatgcccgcgattgtggcgaaagggacagagagtggtgaatgttttctactattaaagcacctcacttactaagtgatcatatttgtgccctaattgaaattgaagacctgcacgccttgcccgaagatccaatgtggtattggcaaccaccgctcaataccgagagtatgtgcccatttctacggccaacccatttgaaaacgcgttgcatacctaaagccacctgcctgatgtagccgcactaccgcccttttgccctcccgatgttacctcacgttggcactaacc

SEQ ID NO: 5798 - DNA, 708 bp, Photorhabdus luminescens
aagctttactgacctgttcaaagcgaatcataggtaattaatcctctcgggcaaaaagtgcctctataaagtcgtctgccttaaatggccgtagatcttcaattccttcaccaaccccaatataacgaataggaatttcaaactgatcagcaatggcgaaaattaccccacctttggcagtaccatccaattttgtcaatgagatgcctgtcaacccaacggcttcatggaacagtttagcctgacttatcgcattctgaccggtactcgcatccaatatcagcataatttcatgtggagcattttcgtccagttttttcatcactcggacaatcttcttcaattcttccatcagatgagatttattttgcaaacgacccgcggtatctgcaatcaggacatcgacacttttggctttagctgactgaatagcatcgaaaatcacggaagcaggatctgcgccagtatgttgcgccctaccggaatatggttacgttccccccacaccctgtagctgttcaacggcggctgcacggaaagtatccccggctgccagcatgacagatttaccttgtgcctgaaattgacgagccaatttaccaattgtcgtggttttttccacacctttacaccaaccatcagaatgacatacggcgtttttccttcaatgtccagaggcttattcactttagccagaatccagacctc

SEQ ID NO: 5799 - DNA, 694 bp, Photorhabdus luminescens
tgccaggattttaagttttgctctgattatcgccggtattatcggtctgaaattgtccagttaatattgaactgcactccaaaggtttcacattttggcagtgcagcttctatacctgtcatctttcaagttgcctctttgttggctgcactcactcaccccggtcacatcgttatctatgctcccggggattcgctcccttgccgtcgcgatgcaccttgaaatccatagggtaatataacccgaattctgcttaatccgtcattgaaaaatcgtcttctgagtagaaaactttcagtgatggcttcttcaatttaaggcagtaagcaatcaatccacctaaaacgcacaacagaaagccttttatacttcggtggcgggaatgctctatttgagaaagagtttttaattgcccattaatcgtttcaatgataaaacgcttttttaacattatcttatcccactcagcttgcatactcgctttcatgttacgccgttttcttctgatgaaagtgacatcggctttagctaaatcgtacgccaattcctggctgaggtaacctttgtcaccgtaaagagaacccgtcaattctttttgattattcacgaacaggttcccgatcatccacattacccggagtcactttaagcgcgagaatttcccctgatgattgcaaccaggtgtatttgaaca

SEQ ID NO: 5800 - DNA, 719 bp, Photorhabdus luminescens
  misc_feature (517)..(517): n is a, c, g, or t
  misc_feature (521)..(521): n is a, c, g, or t
aagcttcatgcgtatcaatcatagttagatctgtcagggggatacctgcacgatcgagcgctattggcgtggcgtatgacggccctaataacatatcttgccagacatcaatggccgagaacgcatagctacgcagataaccaagcggttttgttcccaacgccttagccactgattcacgcatcaatatgaccgccgcagcaccatctgtcagtggtgtactgtttgcagcagtgaccgtgccatacttacggtcaaatgccggacgcagcttcgcataagaggtcagtacagaatttttacgaatattattatcttcaagcaatgcttcacggtatggagggaaatgagctgtcatgacttcatcaaccaacaacccctgttcccaagcttttgctgccagaatatgggagcgatgtgctaatgcatcctggtcttctcgactgatacggtaagtcttcgccatctgttctgcggtatctcccatacgcagacctgtcgaatattccgctaccgncggngatacaggcaataaatcgccaaatttaaggcggctaagtaacttaaggcgttgcgatagcgttttagcccttattatctccaccagagtacgagcccaggattcaatccccccatcgtgcatacagatgacgaatctgctgcaccagcaatcccatattgacccgtgccagccataatgctttcagcccattgggcat

SEQ ID NO: 5801 - DNA, 661 bp, Photorhabdus luminescens
  misc_feature (54)..(54): n is a, c, g, or t
gtgccggtgatttggatgccggtatgcttggtggtgcgaatattatcacgcatntcaacgatggtgaaatatcaggtaccacggcggttgcgttagggggggccaatattctgacgaaaaagggcagaggtaaagctattgcgctgatgggtggtggtgccaacgtgttgactcacattggcaatgggagtacgacggggatgatgttaggtggcgctaatatcttgactaaagtcggaaacggtgacgccacgggtatcatgctcggcctgggcaatgtgttgactcatgtcggtagcggccagacgctgggagttatgggagccgcaggcaatgtttttaccaaagtgggtagtggaactacgattgcggccatgattggtgcaggcaatatctttacccatgttggtaacggtgatgcatggggattgatgggaggtttggggaatgtttttaccaaagtggggaatgcgaaagcactggcattgatgatagccgctggtaatgtgtttactcacattggcgatgaaatgagtgttgccttgatgttggctaaagccatatcgccaacaagtgggcatcgcatgatgctgcagccatgatcggtaggccatgtgataccctattgtaatggtaaccttgctggaagtcgggcgggata

SEQ ID NO: 5802 - DNA, 750 bp, Photorhabdus luminescens
aagcttgtctgcgcgctaaaattgatatggcatccccttttattgtgatgcgtgatccggttttgtaccggattaaatttgcagagcatcatcagtgtggtaacaaatggtgcatctacccaatgtacgattttactcactgtatttctgatgcgcttgaaggtattacacattcgctgtgtacgctggagttccaggataaccgccgcctgtacgactgggtgctggaaaatatcaccattgattgtcgtccacgccaatatgaattctcgcgtttgaaccttgaatatacggttatgtctaagcgtaagctgaatctgctggtggcagataagattgttgaaggttgggatgacccacgtatgccaacgatctcaggcttgcgtcgtcgtggttatactgccgcgtctattcgtgaattctgtcgtcgtattggtgtcaccaagcaggataataatgtggaaatggcagcattggaatcttgtatccgtgatgatctgaacgacaatgcgcctcgcgcaatggctgttcttgatccggtcagattagcgatctacaacatgccccaaggggagcagattttgagtatgcctaatcactccgaacaacccggatatgggcacgtcgagaagcgtcctttactccgtgagatctatattgaccgaccacatctgccgcgaacaggccaatctgccctccttatcccctggttttcgcgcaagaatttgccctgcagatcgctcagtgatt

SEQ ID NO: 5803 - DNA, 695 bp, Photorhabdus luminescens
caagcttagatcgaacaaagctctgtccgccatcacacccaaccatatatgcagcttgccaaacttcatctgcatactttccatcaatatgctccgcataaagttttacttcatctttatactggacaaaatctttaacgcgccagccatatcttattgtaatatttggacgactctttgcatgttgtagtagaaacctttcaacatacatttgatttgcacgtattatgggttctggaacgggatctgtcgaagccgcattttcgcgcatagacattttctccatttccgacggtaacgtaatccgtgcaagctcccatccattaaacttggtaaaatatgatacgtccaaagggaactcttttggcacgcctaatgaccgaataggctgagatatgcctacacgacgaacatgctccataataccggcactatgggtactgcctttaggctgccatcgggtctcttcttccaattaaagataacggaacgaacaccatataaatccaaaataaagccaacattagaccaaccggtccaccaccaacgatggcaacaggtgatacagaaatatctcccaaatccacatatactctccttaataatgatcaatagcacataatatttcagaacaaatatacccgttatctttcaagttggctctttgttggctgcactctcttaccccgtcacaa

SEQ ID NO: 5804 - DNA, 754 bp, Photorhabdus luminescens
  misc_feature (355)..(355): n is a, c, g, or t
agctttcctcgttatcacattttgatttcccttttgatatttcgcctttgttgttcactgcttgccaattataaatataatgaattttcattactattcctgacctgtgacttgataaatttcttctaatgtcgtgatgccttgttccactaataaaataccggatgaaagtaaagtgtcttttctttgagccataatggtgttttgaacatttttaggattctgttctgataatatttgttgaatatcataagttatttctaaaaattcataaatagccgttcggccataataaccggagaaacaatgttcacaaccaactgctaaccattgattaataaatagagaattgttntcaatattaataacggtttcttctgttcgttgtttacggcaatgaagacataattttctgacaagtcgctgcgcgataattaatttgacacacgaagcagccatataacctgaaatacccatattttgtatgcccgataatgcatctatggccgaactactatgcactgtccacagatccacatgacctgcctgccgccctttcacttgaattacaactgccccccgctccgtgccgcccccctctcctgacatcacgatctcgccttctgatggcggtcctatcccgaccaatccatctcctccctgtccctctattgcgcccttctgcctctatcggtcccccacgtcatctcatcatttacaacctcgccttattcctaatctactctccgccgcc

SEQ ID NO: 5805 - DNA, 684 bp, Photorhabdus luminescens
  misc_feature (257)..(257): n is a, c, g, or t
  misc_feature (596)..(596): n is a, c, g, or t
  misc_feature (617)..(617): n is a, c, g, or t
tctgcacccacaaattcaatctgttgaatggtgtggcaaacaaattcagctgcatccgacgttaaaacgggggatggggatacggtgatattgttacgcagcgcttcccgctgttgttgggcttgctgcaacaaggctttttgttgttgcgtgatagtttcttgatccgccgagctgacaggaattgccgcctgtgccagtgcggagattgtcagcagaataagcccagtcaggctgcggtgataaaacggtaattntcccatagatgataattaaaaatttgataatgatattattaaactattctaatgtggtattaatttcccgtctgagtgggcagtgtgaaatgtgatcaatgtctggatctttaatcctgacaatgggaaatcggatatattaaatgctgtaaagtggtgataagaatgaaggtaattttttatacatcaataccaattcttcaagttgcttaatggtattgcgtcccaaatccagcaggcgtgcgatatcctgctgactattctccagcgcatttgctgaccggtaagcgagtaacggtgtcagttttcaagcgtgatttgattgtttagcggtgtttntaaatagactggttgactaanagttcgaaaaattttacgcgcttttaatgattcaaggcacagatttaaataaaaagcgctcaaattt

SEQ ID NO: 5806 - DNA, 728 bp, Photorhabdus luminescens
aagcttacggtggtgaacttggggtcgggtacgccgcgcaacagtggttctcatccggtcacgtactcaaagatgtggataaatttacagctaattcgggtgtggatgataaatctgttgccgccgcgcgtcgttttcgtgaacagtggacagagataagccagagttttgagaaaacaggctacattctgtttaatgcccttttaccatatatcaatgatttcaatatctggctaaaaaacctagctgattggatgaataagcacccagaagagattaaaaaagcggtcagtggttttctcgataagatgagttttattatttcagtcgctaatcaggccgcagatgcggtaggcggttggggtaatgtcatcattggtctgatcgggttgaagtttgcggggtggttatggggaatttatcgcgtggcttcgtccatgctgaaaatggggaaaggcggcgggttaccgggaaaagggattgccgggaaagccggaatatatggcgctatcacatatgcgttatatgatcctgtggagtcagttgcgacttcgattgttggggaagagacaaaacatacacttgattcatatggattgtatctggcaagcgactggacacccttttttagtaaaaaagagtatgaatccctatccgcaaaactggatggtcaaacctctaaccccgatacgaccgtttttaaagaggtgcaatatggacaaaagcgc

SEQ ID NO: 5807 - DNA, 679 bp, Photorhabdus luminescens
aatctcattcatcctcaagactataattacttcaacacattaagtacaaaactaagctggtctaaaaaaatgttctaaaaaattaggtttcactactttactgtataaaaaaccagtttatactgtatgaagatacagaggtgtttttatacacaggagaagtgtgatgctcacccagttaaccattagcaattttgccattgttcgtgagcttgaaattgacttccagccaggcatgacagccatcacaggtgaaaccggcgcgggtaaatccatcgcaattgatgcattaggtttatgtctgggtaatcgtggtgaggccaatatggtgcgtcgtggggcttctcgtgctgatatttgtgcccggttttctctttctgatacgccttctgctcgtcaatggctagaagcccaccaacttgatgacagtaatgaatgcttacttcgccgtacaataacgtcagatggccgttccagaggctctatcaatggcaccgccgtaccgatttcccaattacgcgaattgggtacccaccttattcaaattcacggtcagcacgcccatcaattactattaaataacggccaccaaaacgcctgcttgatacttacgctaatcaattaatttgcaaatggaatgaaacaggcatatcagcatgggcaccaaccctgtaagata

SEQ ID NO: 5808 - DNA, 696 bp, Photorhabdus luminescens
  misc_feature (593)..(593): n is a, c, g, or t
  misc_feature (595)..(595): n is a, c, g, or t
  misc_feature (629)..(629): n is a, c, g, or t
acctcagcccggatatcgaatttttttaaatgctattttagcggggtgggaatattcaccatgatattaatcggtgaccacgatggacgtaacccgctcggctagcgacctatgcggctattacatcataccgcccataccgcccatgccacccataccgcctgctgcacctaaatcagctttatcatctttaggcaggtcagtgatcatacattcagtggtgatcatcagaccagcgatagatgctgcaaattgcagtgcagaacgggtcactttggttggatccaaaatacccattgcgatcatatcgccatactgttcagtcgttgcgttataaccgtagttgccttcacctgctttcacgctgtttgcgataacagatggctcttcacctgagttgtcaacgatctgacgtagaggagcttccatcgcgcgcattgcaacacggatacctacgttttgatcttcgttatcgcctttcagaccaacaatagccgctgcaacgcgaaccagtgcaacaccaccaccagctaccacgccttcttctactgctgcgcgagttgcatgcagagcatcgtcaacgcgagcgcgtntntctttcatttcaacttctgttgcagcaccaactntgataacagcaacaccaccagccagtttagctacgcgctcttgcagtttttcacggtcgtaatcaga

SEQ ID NO: 5809 - DNA, 668 bp, Photorhabdus luminescens
  misc_feature (151)..(151): n is a, c, g, or t
  misc_feature (626)..(626): n is a, c, g, or t
taaatctggaatatggtaatggggttgttgagaatatcggtaatggggtctctgagaatagtggtaaggttgtcatcaaatttgagaaaggtactttactggatatagaaggattaaatgatgctccagcagagattgtgcagtattttangcaatatattcagtctaatcctaatgaatatattctaggtgtattaaagcctaataatggtaaaaatagactttatcctaaaaaatttattgttcgcacacaaccagcccctagcggaacattacgagattctaaaaactatggtgatggagctgtactgctttttattgccactaattataatgcaggtgggggtaacctgccaggagataactatccttacattattccagaaggaaaatcggcagctctcattattgagaacgcaaccctattcggtaatatatttgctgaacatgtttaaaaatatattgatgatgctgcttttacaaccatcaattcagggcagaatagtcctgtaactttgcagtttactggaggatctacaccgaccaatgaaattatagatggttctgtaacttttttagacttcacgactacatataagagctgtgatgagaaaggagaggtgcangttgctcacctgccatttaaaaatttactatagctgctgatg

SEQ ID NO: 5810 - DNA, 705 bp, Photorhabdus luminescens
  misc_feature (516)..(516): n is a, c, g, or t
  misc_feature (561)..(561): n is a, c, g, or t
agcttatgttatgagtagtgggtttattgctattacattaatagctaaaatgaatacttatttgtgtaacaaacaggaaggaggtaataggataataaatagtaagtatcgttgtataaacgcattattttgacagaaaattaagtgtttgttacttatataccctatggatttcaggatgcatcgtggcggcaagggagtgaatccccgggagcatagcaaactatgtgaccggggtgagcgagagcagccaacaaagaagcaacttgaaagataacgggtataggcgtttaactttaatatgaggtttaatatgtcaatacttacaacagatatcgtttcaggaataacggttttagaagcgtgcccggttgtcattactgtgacttattcaggtgatgatacacataaagtaacggaaacgactgacataatgtacagtcaccccaaaaatacccgttttgataagacccctcgtattttaagagatgtcgagataatacctgtactgcaaantttgttgtactgctggttctgacgctggtgattcatcataacttntacatgataggctacggaccccatgctgaattgggatggcatttcttctattgataaaaaggattttacatgccgcgttggaactatcattatggcgatccttgttaaagactaactccggagctgatgagaaacaacttttaa

SEQ ID NO: 5811 - DNA, 692 bp, Photorhabdus luminescens
aagccaaaataccacggttatttatttttcgtgtatttaaccaatcaaccacggctaataggctctgttttcctatagacattgtaaattcatcaattgtccctgaactcaacccaacgtggtgaagtgaatcatagcgaatcacatgaaacccattccgcgataaatattccgctaaaccagcaaaatgatccatccttcgggcaaaacccgacgcaataataatggtattctttctctttgggctgttttcttctggcagcgtttcccaaacatgaatttttttatttccttcaacacaaagaacatggtcgatggttttatatttggatttattttccatactttttacctattacgggacaaatacaaggaacttatcttcttccaggaatcgagtctgttctatttcaaccgcaacatccttagcagtataatgagatggcctctcatgagaaatatatgtcactaatcgttgtaacggcctcattccgtcatgagatccaccaactcgaaatatattattcattcctgcttctacaatcctttccgcacctcttaatgccaacgcatctcgatacttaaatgcggattcccaaggaaaaatagatatggttggtgtcttatttttttgaactaaggcaatacttgctcaatttatcgacgtgatgaagaacacacatctgccaagg

SEQ ID NO: 5812 - DNA, 707 bp, Photorhabdus luminescens
  misc_feature (654)..(654): n is a, c, g, or t
  misc_feature (707)..(707): n is a, c, g, or t
aagcttcaattgtcgccctcaaaccaactgcaatccaagagaaagtgtattcgaacgtttgtaagacccgaatgaacatatattcgtcgtgaatgagatagacgggtaaattagttgtcatcagcatttgctcatcgttgtgtgttttcctttgctctactgcggcaataaaatgttttgctgattcgataacatattccgatgaaatataggacaacttagcccgttgtacgtatggagtcaccgcttttagagccatagcacaacgtttttcaactaaagtacgttctggtaactgatgtctaaaatttccctctgttactaacccgccaagttcaaatttgagtatatccgccgtaagcagtaacatcatacggtcaatgtgggattgcgcttctgcgtatgctttaatctctgtctggtcatcaggcatgtttaacaattcaagcgccagataagagcggtagtcataagtaccgtcgtatttatccaacaagacattcaaaaaacgtgtgacttgctcaatttcctcactgtttaattttgcgcactcttttctagtaatattcaacagctcgagaaaatattcaggaacgaaatgtttacctgtcttatgatacatgcgaacaacatcctgatatgggaaggttgctntattttccttggcaaacccgcatatggtgtgaatgctaagattaatagtgatn

SEQ ID NO: 5813 - DNA, 714 bp, Photorhabdus luminescens
  misc_feature (540)..(540): n is a, c, g, or t
aagctttacatctgttagaatttcaccttctattttttctaataattaatgctgttatgtcaaatcaagatcctcaccatcaaagggatagcctgtttgctacgcctattgccaatctgggagactggcgtttcgatgaacgggtagccgaagttttccctgatatgatccaacgctccgtgccaggttattcaaatattgtttccatgattggtatgctggccggccgtttcgtgacatcaaacagtcaaatttatgatatgggttgttctctgggcgcatcaaccctggcaatgcgccgcaatattgtcgctgaaaactgcaaaattattgccgttgataattccccggcaatggtggaacgctgtcgtcgccatattgatgctttccggtcgcaaacaccggttgaagtcattgaagccgatattcttaatatcgatattcaaaatgcttcgatggtcgtactgaatttcaccttacaattcctcaacccgcaagatcgacaaggtttactaaaccggatttaccaaggattacgcncccggtggtgttttagttttatcagagaaattcagctctgaagatcaacagattggtgagttactgtttaatatgcaccacgattttaagcgtgctaacggatatagcgaactggaaatcagccaaaaacgcagcatgcttgaaaatgtcatgttgactgattctgtagaaaca

SEQ ID NO: 5814 - DNA, 683 bp, Photorhabdus luminescens
  misc_feature (36)..(36): n is a, c, g, or t
  misc_feature (114)..(114): n is a, c, g, or t
  misc_feature (118)..(118): n is a, c, g, or t
  misc_feature (198)..(198): n is a, c, g, or t
  misc_feature (241)..(241): n is a, c, g, or t
  misc_feature (295)..(295): n is a, c, g, or t
  misc_feature (636)..(636): n is a, c, g, or t
ctatcggcgctagaaagacctcaagcttgcgtccanagagatattgttgaccaatgttaaataacatatttattcattggctcaataacacgggtatcccagagcggaaattgngcanaggtgaattgttaacgccacgcgcaacaaaaccctgcaaccactcaggggcttgatttaacaccttacgggccgatgctnctgattcaaattcaccgaatacacatgcaccggttccggtcangcgtgacggcgcgtattctagcagccatgaaagaagctgttcaaccttacgganacgttttcttacaagagattcacaatcatttaggtacggagcctttaataatgcggccagagggcgaattggtgtatcacgtcataattctggatctgtgaagacactctgagttgagatttcaataccaggatgcgcaaccagataccatttttcttccggctcggctatgtgcaggatttcaccaataccttatgcgaatgcagcatgccctctgacaaagatgggcacatcagcaccaagacttacgccgagggcggtcagtgtttcgtctgtgaaaccggtttgccagtgataattcacggctatgagtacggtagctggattggatgaacctgcgnctaacccaccgtccattggcagacgtttgttgatctgaatatcagga

SEQ ID NO: 5815 - DNA, 775 bp, Photorhabdus luminescens
aagcccgaactacccaattaaagaacccttggaaatgaaggaaccaaaagtatgtccgaagtaatgcataccggcatttcaagtccagattgtcactaatgtgaaggaatagaagatgaaaaaacaacaattgaggctggcagttttatctctgctgctggtcgcctgtagccaatttccggcacaggcaggcatcattatcgccattaaccatactaagtgggcgattaaccggttcactgtggatgatcaaccgggtatcgatattatcggcccgtatcagggcggtggtggcggttgctgctatcgggctccagataagtggcggccggggatgacggttaaggtggattgggagactggtgttggggacatgggggggtttccccgctttgcagatagaaaaaaatatttggcgtggagggacaagattaatgccccaaagcgccagcatagccaggtagtaccgttgcccgattataccgggcagggcacctgcggtattacagggcatttcttaccctgcgatcatgggaaagcgaccacctcgtgttacacctacggcagtccgacctacccaatgcaagaacccgcgggacctgaccgaaccccaaatcttttcccaaatatatcctcactgtccttttctggttccccatcccctctccacccctaacggggcggcataccccgtcaaacaccaccgcggtggaggattactttcgtccacctatgcttgttgcaacatggttactcttgcggacctttcgctggc

SEQ ID NO: 5816 - DNA, 779 bp, Photorhabdus luminescens
  misc_feature (231)..(231): n is a, c, g, or t
aagcttgcagagcatgttgaaccatcacgcctgatatgttggatatggtgactttgagtgaaaaagagatcgcagttatttgccagcaagttgagggtggtgccggtaacatacaagatatttatccattatcacctttgcaggaaggcattttctttcaccatcgaatgaatggagagcacgatccttatattattccgattctgataaagttttctgatgagcaaaagntgacagcttttctccatgcgcttgataagatcgtagagcgtcatgatgttttccgtacttctattcattggcaggatttaaccacatcggttcaagcggcccatcgaacagattctattccccttcattggcaagcggttattccaggtctttcggcgttggaaactgtgccacaggcggcctttgaacgccattatatgaagctggatcgcgcttctatgatgcacgctatttgtggccaaaggcgacacacagccgatgaatgtttatctactattaaaagccccattaccctccttccgccatgctaatttccgccctatttgccattgacaaacatcccccccgtcctctgatatccaatgacggctgcgcaacattcgccccacaccccaattcttccacattacctccatgcttatcccttccgcaatcggtagccatcccttcaaacctacttcgcctaagttccgccaccttccccctttttccctcccccaatttttaccccactgagtcctcctccccatcgtcccaattttcatccc

SEQ ID NO: 5817 - DNA, 699 bp, Photorhabdus luminescens
  misc_feature (34)..(34): n is a, c, g, or t
  misc_feature (41)..(41): n is a, c, g, or t
  misc_feature (218)..(218): n is a, c, g, or t
  misc_feature (294)..(294): n is a, c, g, or t
gcatcaatttcagccagttcaatacggaatcctngcagttntatttgatcatcattacgccctaaaaactccagcgttccatcaaattttaatctcgcttgatcacccgtgtgataaatataaccacaacgaccagaaaggttgtctttaacaaatttttgttgcgttaattcgcgattgcggttgtaacctcttgccaaaccggggccacctaccgnaatttcacccactacccccataggtacaggctcgccataagcatcaaggatataaatgtgggtattggcaaacggngtaccgatgggaacataggcatcatcaggcaaacagagatgcgtgacatcaccgcaactagcatcaatcaccgattctgtttgccctacatattgaaaccaccggcctcggtatgcatcaacttttgtaaacgggtcacaccacgaccataccaagcttcgggacccactaatgtttggtgcacggaatttacccgacctctgcttcgttcaggctcatcaagtaactgcttaaaatgaccggcccaaactctccaatgtgccgtgcttgctgtcaacaagctgatacacatcccctgtggtcattaaatcctatctcgcgacaatccccatgctggcacccggtggaaaatcccctaggcgattccccaatacaaatgggcatagaccgatcccgccttggtgg

SEQ ID NO: 5818 - DNA, 775 bp, Photorhabdus luminescens
  misc_feature (182)..(186): n is a, c, g, or t
  misc_feature (362)..(362): n is a, c, g, or t
  misc_feature (743)..(743): n is a, c, g, or t
agctttactctccgattgaaaacgttattaaagcacttcattttgaaaaatagattaacggattaatggactcatattatcatttatctttctccccgaaaacataaccaaaccaatttttatttctccgcttccattaatggctttataattggcagattttaaattattattaaaagtcnnnnnttaaccgatgattttaattagcataaaactttaaccgttgtttttaccacttataacacttgctttttcactaagtttaatcattatgaaatatcatactttacgtttacctaacgtaggttaccccggctttttatctttattaacactattttatagataattttaagcagttnttatagaccaccaccatttgttttttacatgaattagccaataaataatctaatgatataaagatacccctttattttttcggataatcacctctttttcagggcttaaatcccgccaaattaaccgttttatcccttttttattacattgcctcttacagcttgcttcaaaaataccagtgagaaaatcccttaatctcatcctgccaggattaatacattctacggactagtgtggtcttcactgtctattaatagacttatacccgacatcttgaagtcggccttttgctggctgaactcgttaccccggtgacctaaatatctctcccgcggggatttcctcccttgcccgccggatgcttcctgaatacctggggncaccttgaacacatgcatcctgcttattatga

SEQ ID NO: 5819 - DNA, 696 bp, Photorhabdus luminescens
ttatcttttttttcaagtgtataaggttggaagaattctatacgttgccaggtacggagaatatcattcgaaagggaaattgcggccatcatagctctttgaattatctaataaatgccttgaatgataagagtacagcaatcaatatgggttttgtaggcgtttggcttaagcgttatgacatacgtcacagtctggtaacaaagccccccatactttattcatcttccttatcacgaagcactattcgggaatgctagctacaagataggttaagtgtcgtatatttgctgtgatgaagaaatagccagaggagaacagcaaattaaatggataatttaataaaattattccctgatgttgcggatgcgagagcatcttcacttcgataaaaatgagcccaaaatgaagcctaatgttcgtcatatcgagaccgcaaagcctatataacgttaactttacctaagaacacgaattattagcatcacataaattcaagctcgggtttttgggttggaaggtataaacaattaatcccgaaacaacctttaacaaaaagccgaacatattaagctacacctggaaagagaaccaacacgtttcattagattcctgcttaacacactacacacatttggtttacctgaaacgggttcggcgtgaatttcccttctatgctgaatacccgctgtaaaa

SEQ ID NO: 5820 - DNA, 712 bp, Photorhabdus luminescens
  misc_feature (468)..(468): n is a, c, g, or t
aagcttcttcaatacggatcaactgattgtatttagcaacgcgatcagagcgactcatagaaccggttttgatttgacctgccgcggtacctactgccagatcagcaatagtcgcatcttcagtttcaccagaacgatgagaaattaccgccgtgtaacctgcgtcttttgccattttaatcgctgccagtgtttcagtgagagaaccaatctggttgaatttaatcaaaatggagttagcaatgcctttctcaataccttctttcaggatcttagtattggtaacaaacaggtcatcaccaaccaactggattttttcgcccagcacttttgtctggtaagcgaagccttcccagtcagattcattcaagccatcttcaatagaaacaatcggatattttctggtcaaatcttcgaggtaatgagtgaactcttgagaagtgaaagttttaccttcacctttcagtntcgaattaccggtttctgggttgtagaatttagaagcagtacaatccatagcccaagtgacatctttgcccataacatagactgcttgcctaccccttctttatagcagccaccgcagcagcgttagattaccagttaggcgcataacccctttcgcaccaaccgaaggacttatgcctttcgctctcagaactttagccaagttatggaaaacttcagaaccgataccaacccgactcttcac

SEQ ID NO: 5821 - DNA, 692 bp, Photorhabdus luminescens
  misc_feature (363)..(363): n is a, c, g, or t
  misc_feature (439)..(439): n is a, c, g, or t
aaatctataatgcggtatttcagatcatgtttgcagtacagaataaccaacgtgacgcaatactgggacaggatgatattattgaactcggggataatttactcagaacaactcggtttgatttggaaatccatgtttttgaagaagaacagacagacgaattatctatagtatggatttcaaataccagtctgttcgatagtaataccattgaaagatttatcgccaattacgcaaccttgctttctggcattgttgaggtaatgacagatgactcagtcaataaagagccctccattcatgaactcccattattgtcagaagctgaaaagcatattttactgcatgaattaaatgggccgnagaaccattatccacaagggcgttgcttccatgagctgtttgaagaacaggtggcactgaatcctgaaaaaaccgngctggtttttggtgaggaaaccttaagttatcaagcggttaatgttcaggccaatcaattggcgcattacctgattgagcaaggtatccagccagatacccttgtgtgcatttcgccttccccggtcgttgcaaacagtgattgcactgctgggcatcctcaaagcgggtggcgcctatgtgcctttggatgccagttatccgcaagcacgcctgcaatacatgctggagcacagccgggttgaagttacctt

SEQ ID NO: 5822 - DNA, 714 bp, Photorhabdus luminescens
  misc_feature (701)..(701): n is a, c, g, or t
aagcttggtggatgtctcctccggctaactcagttttatcgtgaatttcagcaacaccgaaatgttcgtttaacaaacgatttactgtctgccacatggttcacctctctatgtcgtcaattactttatgaacaattatagtcagagaaaacatatgatcaggtaaaaaagatgattaacagggttatatctcaaaacagatataaccctttttgttattgattgggctcgttagagatttgtagggctgcttgatacgttttacgtttggattttgctcttacaagttttatctgactgtaagccagtgccagtgtaaagaagatagcctgaacaataacaatgcatggccccgttgcaccatcaatgtggaaactgatcagagtacccaggacactggaactgactgatgcaatgatagcgacaattaacattcggtcaaaactgcggcataacatgaaagcgataatgcctggtgatatcaacattgcgataaccaaaatcattcccacggcttgcagggaagcgacgatggtcatggacagcaggcaaagcaaaccgtaatgcataagtttaacaggccatcctactacgcgtgcttggttcggatcgaagcaataaagcatgaagtctttgcgctttagcagtatcaccgccatagtgatgcaggtaatccataatgtcctgatgccactcatctntagtgatccctag

SEQ ID NO: 5823 - DNA, 684 bp, Photorhabdus luminescens
  misc_feature (19)..(19): n is a, c, g, or t
  misc_feature (425)..(425): n is a, c, g, or t
  misc_feature (589)..(589): n is a, c, g, or t
tatttaatggcaaatattntagcgtaaataaccaacacaacatagataatagatatccagccagaccagccattaccgccaccagagaatggcgatgactccatagccactcaatatcaaaccaatgcaaaccaagattcaacgctggcaaattgacaacaccccatttcagtaataactgggctattgtcaccagtaatacactaattaatccccaaatataacctttcattcattcaagctcatcagcaaaattcccaacatgataaacacaaccccactccaatgttttatgcccgctttttcctgatagaaaaatttccccgccaaagtgaccataataaaatttatactcaacattggataagcaattcctaacggcaatatctgtaataaacgaagccaaaataacatgccaacagccnatagaatcacagcccctattaaccatttcagcgcagatgcccgctgataaacatcactgcgccaacacatcacagcctgcttctgacataactgaccagcacatgtcagccagctaatcagaacaataaagagaaacttatcatggttgcttctcatacacccnattacaaagcgataattgcgacttaattgatctgcctttggcacatcaggtaatttttcatctttatataaatgaaagagtactgctacccgcca

SEQ ID NO: 5824 - DNA, 710 bp, Photorhabdus luminescens
  misc_feature (611)..(611): n is a, c, g, or t
aagcttcctctgcatcatgaatctgcacggccaacgttgccattcccgctttacaacctgccaaattctctgcaacctgtttaataatctcttcgggaatcagtggttcatcaccctgaacattaacgataatttcatcatcggaaaattgatatttgttgataacctcagctaatcgttcagtaccagaatggtgattttcgttggtcagacaagcctctccaccggcagccacaacggcatcaacaacgtcgtgattatctgttgccacaatgacacgtccagcacctgaacgtttcgcccgctccataacacgaacaatcattggtttgccgtgaatatcggctaaaggtttaccgggtaaacgggttgaagcaaagcgagcaggaataataacagtgaacatgccttatttttcctcatccagaggtaattcgcgggcttcgtgctctaacaggacgggaataccatcacgtacaggaaacgcaagtcgatccaacttacaaatgagttcaaaattctctttatcgtaactgagttttccgttacatacaggacaggcaataatttcgagtaaacggtgatccatacatcctccaattatggagctntaatttaatgcagctcagaataacctaagcttggcatcatcgttaactcttggtatttgatccttcgatccttttccccatattatgcactgaaaatca

SEQ ID NO: 5825 - DNA, 683 bp, Photorhabdus luminescens
  misc_feature (458)..(458): n is a, c, g, or t
tatcaagggaaggttttgtgctgttattaaaaaccattgttttaatcttaggttttaattgacataaggttttaaccattttttactactttgaatatctgctttttattaagtttaatcattatgaaatatcgtgttttacggttaaacaacattaatcatacttgctttatctttactgactctgttttacctttattttatcttgataaatcagccagtaaatagcttgatgatatatccccgtcatctttcaagttgcctctttgttggttgcactctctcaccccggttacatcgttatctatgctcccggggattcgctcccttgccgccgcgatccatcttgaaatccattgggtataaagatatccctatatgttattctcgaataatccttttcttttttagggtttaaatcctgatacattaaccgttttatccattttttattaagntatctctatggcttgctgcataaaataatggcgagaaaacaccttactatcaatctattcggataatattcctttgcatgctgatttcttttcattctctataatagttaataaccttcgataagtatgactaatcgcctttataaaaattgcactataggtaaatcttcctgacacataaaaccttaatctctctgcgttcgggctattaatgggtttggcagt

SEQ ID NO: 5826 - DNA, 752 bp, Photorhabdus luminescens
ctataactatactcttatctattttcgttcctagtgaagctttggaattaacatttgtatgcgagatgtttttatcagcaccaagggctatttctccaattttcgctgtctgtgctttttctttcatcaaattatcaatcgttgaactattttttctatcaacagcttctatcgattgatatttactcaaagacagatatgctttcgcggctgcaaactgtatcagctttgcttcactggtaggtatccctccggcaacaatttccgccgctttctgtggcgtcatctgctcatttgataacacgacatccaacggaacaccaaagaaattaccccacgcaataatcaaaccttttgctgggtcctgaccatcagggacttgcccttttagatagtgagttaaggctgcgttgatttcttcggatgttgccccagattgggccattttttgagccagtgaacccgcaccttcaaaatgtttagcgccttcggcaccaaacagacttcccatgctaagggcattattatccgcaacaacccattccattgcgaagttgaccgccaaacaccgattttcccaatgccctcagccagttaccacccgttttttccaatgggcgttcaccgccggacccaaaaccccctgacgcgcttttcgcccccgaaggccgggttttcccgccgcactctggtcagtgtagcgccttcttcggcacgggcgaacgtcgcccactcgcttgggcggcggtgcc

SEQ ID NO: 5827 - DNA, 811 bp, Photorhabdus luminescens
cacaaaaggggatatcgcaactcaacagtgcgacaaattctgacagagaagaccaagctgcgacgccgaaagcggttcacgatgttagaaaaatcgctgagagcaaattgagtggtgtttctgatgcctcattgactcagaaagggattgtacaactgagtagtgcgacaaatagcacaaatgaaaccttagctgcgacgccaaaggcggttaagggggcatacgattttgcaaatacagcaaatgtagcggctaaaaatgctcatgatgaagcgaacagggctacagataatgctaacagcagattggcgaaaaaccaaaatggcgcagatatccctaataaaagtgagtttataaaaaaccttggtttaacagaaaccgtggaattggcgaaaagtgctgtgccgaacagccggaaaattaatggcaaggcgttgagtggggatgtcagtttgaatgccggagatgtgggggctttaccgatttcgagtacattaagcgctcaaacaggcaccttaagaataaacaatggatcgaattggccgaatatcgaattcagagcagcaaacaagcattttatcggtattgaaggaacagctggcaatcgtttgacgatatacgctaatgatgaaaacagcaatcgcaaatatactttagcaacaccagaaaaatccggcacgttagcaacacttgatgatatcaacatatctgtcggctcacccatcccatggccgttaccaaatgtgcctgctggttatctcgcatgcaacggtcaatcatttaataaatcactatatccacaattagctat

SEQ ID NO: 5828 - DNA, 823 bp, Photorhabdus luminescens
  misc_feature (748)..(748): n is a, c, g, or t
aaatccctgctgcttcactgacacaaaaggggatatcgcaactcaacagtgcgacaaattctgacagagaagaccaagctgcgacgccgaaagcggttcacgatgttagaaaaatcgctgagagcaaattgagtggtgtttctgatgcctcattgactcagaaagggattgtacaactgagtagtgcgacaaatagcacaaatgaaaccttagctgcgacgccaaaggcggttaagggggcatacgattttgcaaatacagcaaatgtagcggctaaaaatgctcatgatgaagcgaacagggctacagataatgctaacagcagattggcgaaaaaccaaaatggcgcagatatccctaataaaagtgagtttataaaaaaccttggtttaacagaaaccgtcaatctggcgaaaagtgccgtgccgaatagccggaaagttaatggcaaggtgctgagtggggatgtcaatattacctctcaagatatctttaatgggcaagcaatatcgatccctgacaaagccgatttaaatgattatcaaacgccagggctttattatcagggtttaaatgtacaagcgacagccggtaaaaactaccccgaagcatccgctggttctcttgttgttttacaggctgctggcactattcaacgttattttgtctataatagcagtcggatatatacacgggcttaatacccgtggagcggtccgggatggacaccttgggcacaagaatatancacacagaataaacctatcgccggggatgtgggggcgtatccaaaatctggtggtattgtacacgggaatgtggt

SEQ ID NO: 5829 - DNA, 1227 bp, Photorhabdus luminescens; identical to SEQ ID NO: 12

SEQ ID NO: 5830 - DNA, 1228 bp, Photorhabdus luminescens
agcgtggaatccacccaggtgtatacgcaggtctctatccgggccttgcaggcggtgcacgccagtacgcatccggcggagcaaatggccgacgaaaaagtccgcgacgccgatgaggtgggtttactggccgacctgtacgccgacgataacgccgacacggacacgccgccggacagttcagagccgacctcaaccgccgatagccgctgagcgtccgcacgcccccgttgagttgggcgggttcggtgtgggggcagaccgtggccggactgcccgtcggcatcggcgcacgcgggggtaaatagtcgtcaggcggctcaaccacgagcgtccccgttaagccggtccaggccgcccaacgcctattgaacataatgcgggggaattatacgcactgcgccggtgagcccgggcaaccgcctgagcattgatgagcggcttaatgcgtataattggcattatgtcttgcgcccccgcgggtcagcattggcaggtgtggcgcacaaggctgacgccttctgctatcagcggctgagccagtcctcggcaaaaacccgtgttcttctttagctgccgtgccaacgtccggccaacaaccctgaaggcagatcggcctgcggcctccgctcattgacttccccccgccccaaccccgctgcactggctgcgcccggttcgcagtcgcaggctccttgctcattcccgtgctcgccatcgccgccccgtgcagcccctgtctcttgatcagatctccaaatcaactgatttagccagcaaatagccgtctatcagggtttgcagccgaaaccagccttcccaaagtcgttcccatccgactcgacccgtgcgtttggaatcgtaccagccggccagttttcccagattgatgaaggcccaatgcaaactcggggcttttttcggcacacggcgtttttcttgttttgaccacagtaatttccacgccagggggcttaatactgtctcacagctctctttctctgcctcttctttgttcagacccataaaacgcagctggtgtattcgtaccgcaataaaggccagcagcactatcatgcgctccagattatctttgctttgcatacgcagcgcttctacctgcgtgccgcccgttttccacgctttgtgaaattcttctatcagccagcggcgctcgtaataactgaatattttatgggcgtcttcctgactggtgaccggttcggaa

SEQ ID NO: 5831 - DNA, 4383 bp, Photorhabdus luminescens
ggaagcgggcagaagacggatccagatctctgttctgcctgagatagcaaagttactttccgtctcgctcgaagaactgttcggcgaagagagcgacacgatcccccgtaaacggggaccggcttcacggcttgagcaacagatacagattatcagccagttgccccgcgctaagcagaagctggtttcagagatgctggatgcggtaattgcacaggcacaacagtaaaagacagacagctaagagaaaggatttttttacgcggatggagcaggcggcaacctgccacaaccgctaaccacaaccaactaagcaggagttgatttatggctaaccgcgattgtaatgcagatttagcgatttcaaaagcccggcgcagctataaggtggggtatgcccgcacccgccacgaagaccgcagcaccggtatgacccgctattacagccagcaccccagtttgcatcttaaaggcaactggctggaagaagcgggctttgccaccggacagccagtacaggtcagtgttgagcacgggcagttgattatccggctcgttgagtacaactgacggctcaaaaaagatcccagccaagcgctgggatctttagcatgactaattaccttctatccatacttgctttatccagctagcaagatcaggccaactttcctcgttataaccatcaagcgtccagtacttaatttttccgtcataatcaatacaataataactgccattatcttcacagatcgggagcaaattttcaggtagcccttgctctcttgcatcgcttaacgcttgtgacagttctccataatattttttatcacgggtaacagataacaaatctatagttccgtagaatatattacttatttttttcaaaacctctttataatcatttgaaaattcgaaaccaatttctttttcatactgagaaattaattcatcatctggcaaatcaacatcatttctttgaccatctgataagcgttcgatttcttcaataacatcattaagtttagtattcatacgtaaccctatttaaaatcgttagctcggtggttccaataatcagaacgccacttattaaactccgagcggttaatacctgaggggatactgttatcatttatatgtatgaccttatgattatccttatgaaaactctgcgttacctcagctataggtccatcctgcttttgtaacatatgatgtaaattgacaggttttccatcattaccgataggtgctctaccagctctcataagctctacgtttgtcttacctgatttaggatcaatacggcttggatcaaacaagtcatttcgttgataaaccttatttcccttaaagggaactggctcagccgaccaatattttctgtcctggccaaagtattttgcgacatctgtctgtgttgttgtacttgatttattagccgtttggttaggctgtacttgagtagcttccgccggaacgcttttatcaacattattttttgatgatacagatgatggcttcgcctgtatcttattactggctgctcccccaatagccccgaccgcagtctccagcaacaacaggttgcgctgctcttccttcacgtactgcgccgcatccgctttggacaagcccgatttttccagctctttttgacgcagttccgtgttaaaaaacccggagaggggtccgctgccgccatttaaccagctgctctgctctgaacgccctatcttgtcattggcacggtaacctgagacggccagctccttgcccagttcatggttgatgaatgccagttcttcacgactcaactcaccattcaacgccatctgtttcaggctgttgatggtcgcatcactggcctgccggtactctgtccagactcctttacggcagctgtcatcctgacatgatgccagtttaccgcgcatgtcctccactgacggcaagcctttatccagaatgcgctggctcagctccttagccttgccgcacgcttccggtgacagcgtgcggcaatcacccagatttcgcgaggccagcgcattattctccacaacaacccattccattgcgacgttgaccgccaaacaccgattttcccaatgccctcagccagttaccacccgttttttccaatgggcgttcaccgccggccccaaaaccccctgacgcgcttttcgcccccgaaggccggtttttcccgccgcgctctggtcagtgtagcgcctttttcggcaacgggcgaacgtcgcccaactcgcttgggcggcgggtgcccgttctgcgggcgcgggcggcacagagcccgcaagcggcgcccctgcgacgctctgaggcactgtggcttcggtttgcgtatgaccttgcatgaccacgcggttttgttttgttcagggaagcccccgggggctgcacggggcggcgatggcgagcacgggaatgagcaaggagcctgcgactgcgaaccgggcgcagccagtgcagcggggttggggcggggggaagtcaatgagcggaggccgcaggccgatctgccttcagggttgttggccggacgttggcacggcagctaaagaagaactcagagttgccgatgtccggctcagtcggttagagcataaggcgcagccttgtgcgccacacccgccaatgctgacccgcgggggcgcaagacataatgccaattatacgcattaagccgctcatcaatgctcaggcggttgcccgggctcaccggcgcagtgcgtataattcccccgcattatgttcaataggcgttgggcggcctggaccggcttaacggggacgctcgtggttgagccgcctgacgactatttacccccgcgtgcgccgatgccgacgggcagtccggccacggtctgcccccacaccgaacccgcccaactcaacgggggcgtgcggacgctcagcggctatcggcggttgaggtcggctctgaactgtccggcggcgtgtccgtgtcggcgttatcgtcggcgtacaggtcggccagtaaacccacctcatcggcgtcgcggactttttcgtcggccatttgctccgccggatgggtgctggcgtgcaccgcctgcaaggcccggatagagacctgcgtatacacctgggttgactccacgctggcatggcctaacatggcctgtatccagcgcaggtccgcgccgttctccagcatctgcgttgccatcgcatgccggaacaggtggcaggcaccttttttctcaatgccggcggcccggatataaccgcttacggcattcgtgataccgttcggctgcaacccgtcgagaccgtccattgccacgaacagtgattggatgtccggggtgaccagcagttgcgggcgaatctgttgctgatagaactggagccagtttaaggcccgttcgccgaggggcaatacccggtctttattccccttgccctgccggatggtcaccgttttgcgtgacccgtctatgctgtagatatcgagccgggccgcttcactgcgtcgtatcccggttgaccagagcagctccatcagggcccggtcgcgcgcgccctgcaacgtattcgggtcaggcagcgacaggatatgctcgatttcatcaatgctcaggatataccgcggcaggcgtttttcttcccgcggcaactcaatgtccgctgccgggttcgccagtatcaggttctgtttcgtcagccatttgaaccacacctgtaacggctgcaactgcgtgcgctgggtgcggatgctcagcggctctccgttggtctttcggtactggtacaggtagcgctggtaacgctccagtatcggccgcgtgatgtccgcggcatagtacaggccccggtccgtggcccacaggataaagtgataggtgtgatgggtctgcactttcagcgtggtttccgaccagttccgttcctgccgccaggccacgaagcgcagcagcagtgcatacaggcttttcgggtcatgcgccggccccacaggctgacggtagacgtcattaacggtcagaagactccccttgcggggtttacggtttgccatgattaacctccgtttcggattggggatgggcggctgaggcagcgggcggtggggccttttgcgttttatgtctgttaaccgttttctttccggccccgcccggattttgtctgtccggctgtgtaccgacctggggccgacctgtacccgactgaacaccctctgaccccgaccggaacgccttgcccgcaacagcgtcattcgtcatttctgtttcttcgggcagggggattgaagccggttttttttctgtcttaataactgctttttgctttaccccggccacttccgccgacaggtctgatgttgcctgc

SEQ ID NO: 5832 - DNA, 16467 bp, Photorhabdus luminescens
  misc_feature (13643)..(13643): n is a, c, g, or t
attgaatgaagatggacttagaacagcggcgtaaccattagctataccaccactggctcctagtcgattcactgttaacattacattcacacatgcattagagaacctaactggtagctgaactgtgataatctctagaggctctagaactcgagttactccccactgataaatcactccagtatcgccacatttccaccaaccatttgtagactttaaggccatatttttgctgccatatcgcccatcacattcacctgtggtatatgcgcctagctcgcccggtgacggtttgtttacagcactataaacacgaatacttgggtattcatacacacctctgccggaaatagaccctgttgcatccaagtacccacccaaaacaccaccggattttgggtaagcacttttcgccaactccacggtttctgttaaaccaaggctttctgtagttcattaactgacggcaatctttgtcaacgcagcttttaaaggcattcaatgggactcaatatggtaaaaattgggcagatctgagtaccaataaataaccaaaataatgattgagaaagaaatgtattaactatgatggaattacgaacaataattgggtggaaaatatacagaaaattagcctcactttgcgttttaacgcaagttcatttgagataaataaatttactttgtgtgtatgcgtgcatatgcttatgtcagattgggaggatatgaaatcaaccaacctgataaaagagctgattgctgttggacgcgaacttagaaggagttaccaataaccggaaagacatactcggttccgcatcccaaaaaatatcagcctatcagtattgccaaatctataaagaaaatggtgagagtttaatccccgtcgactttggaggtcatcatgtttttttcagtaggtgttgagttatcgaaaaatgaaaatacagcgtatggtttggtcattcctgcgctgtgtgccgaagattatggctgtttttctgccgcggataataaagaagacattgcgataatggcacgtgaggctatcttgttaacagtaaaagatatggtcgcgaataatagcgcagttgaacatattcaggatgctggctatctggtttatgcaaaaaacgcagaatatcaatacattgataactggtttgttatcaacgttgatttatctgagttttccggaaaacaacagcgtattaatatctcattacccgatacactcattcagcgtattgataatcgcgtcaaagaaagtccgacacaatatcgagatagaagtcactttttagctgaagcagcaaaacatgaacttaggtaacactatggtgcatggatgcgccatagtttaaaaagcattcaattgatgctatgtttgtgagtcctttacactgccgtatgaacgcaaaacccgaatgataggtgccgcaccttctttgctggtcataaagcaaccaaaataacgatttatttagagaaaaatacattcattttgaaaaaactatgaacaagctttagatgataaattaacgagtttacatagttttctttaactcgtattatgcgatgtattacacttttagttttagaattatctatcatgatcatgcaactaaggaagccgatagtttactgaaatttactaaagtaaagtatcaggaggaaaactcgtaaatattgcgggaaccaaatataaaaccctttaatttgcatgaagcccccgcaaaccattagatcactcattaatacacataaatcaaatagatattaattaaaatcctttaataaaatacattaaaaagcatcctgtaattacaccaaaagtaaaatactttattttccttctattttcgcgtttcctctgtcttatctcttcatctgtttttatatgatcatcccaaccgatatgcctaactgcgcttttatctaaaataactgcatatttatctatttctgcatacttctttgatagtgtcatctctgtatcacctgctagattatagggcatgaataattcataatctgattttcttctaagccctggattaaaactgaatcccctccatctgaaatcattgctttccagagtagaaaaacaaacaccttctaattctctaaaattactagggtaatggaatggataatgaagcatcacatcctcttttaaatctctgagccagacttggagtatgtttttatcagacttcaaagcaacaaaagaatcctcaataaatctatctctatagaaaagccaatcgtcttcacaatggaagatatagtcagtttttactttactatatgccagatcaattgacttaatttgccctagtttaggattgtttaaaataatttcacagtatggtagccagtgctcaggtatgacagaatgaatagacttatctccagaatcctccgttacaacaacctcttttataggataagaattatacttatcaaacgactcaatagtttgctttaataaatcaaaccggccacaacttgtaatgaccagggtaacatcacttgaatcagaaaataacataatatttactcattgacttttataaaattcactattacttggtatgataacaaacaaaatactactttcatagtgtcagaacgataacttaattttaagtattttttagtaaaagatcatatattaaacctgaacttatcaatatcctcaatataatatttatggctttatccgtttcaccaataagcggataaatatccgccaaaacattgtatataattttacgtataatgaccttctttttctttgaattctgaagaattcttgcctactttgcttttgtttttttctttctagcgccaagtttgattgaagatatagcggcgttgtagagatgaccggaggtaccactgctttcacttttatgatccgtctttcattgagaaaacgccacttatcagcttcaagccaaacgggctgtagaaaatcaagtaaacattgtgcagcgtaattattaattacataaccataagtacaagctgcttcaatcacattaactaaataatactgacccgttatatttttcttgaaagtgtcaatatattcgttagttttattaagtaaaatgatattgggtttgttaggatttttggtgttgaatttatctaatgcactcagtacatcagagatatttttattgatttctgcatcgtcttccatgataagagctaaaggaatgttttcgtcgacaattctctggtagactaatagatggcttaacgagcatcctagctctccaagagtcatcccgttattataaaagtcgcgactaagtttcattacttcatctttggaaagctgtttgccatttaccgctttgattatttcaacatccaatctcaaagatgatgcttgctgtaacatcgaatactttctttcgacatctgattctaagttaattataaaaattttcatttttttcctggtaaaaagtagggaggctctaaataaaaaacaagctatgaaatttctaacatttccaaatatttcaacgacaccattaaccctcaaagttgaaaccaatcatcagtgttttctatgtttttcattttcttaataattctcttatcacttaactatgctgtggtcatagcaccaagatctcctcaaatgaaaaggtaaaacattatccattcgttgaaatcatattttttcttattttcataaattttcttttaaaactaaatcgaatattactatctagcatgaatcctaatatcgaaaggtttttcactatctgatagatggagtcagaatatttttttgataatttatcctcatatttatagatgagttctatagcatggcaggctgtgagattcctaaaatttttaccgaaagttttatccattattaagatcacttctgccattatatttacttttacgtcattaatagaattagaaagactaccttctctctttatataattatagtatttcatattagtataataaatactattacacttaactaaaaaagaaggaaatgataacgcatcttcataacaaggaacttcaggaaaattacttccacaaaataactccttcctaaaaaacttccctattgaatgcgcctgaaatttcttatgaattaaaaattcttttattgccgtgtttctgtgaagttttatgggagatgataacctcgacctttctattatatccgcatcttttcttacttcatttaacttactgataaatatatccggctgtctatattctaagaagtctaaaatttctctcatagaaaaatcagataaaaaatcatcaccatcaacgaaagttatatactctccactacttatctctactgcatatttttttactttacctaagttcctaaactcctttcttatataaataaaagactcattttcttcagagaatttttttaaaattgatggggttgaatcaaaagaactgtcatctatcagcaaaacctcataatcatcagaagagactttatataggcatttttttacgctctctaagcattttcctattaaatcctctaagttatgtgctgcaactataattgataactttttgttagaatgtaaatatgaaccttgcattatcatacctcttgtattatttagtagatgccattaaacgtcaagtgctgattttactcttttcaaataatttgaaatcgccatttttattttatcactgtcagatagttttttacgttaactatattctgtattctgtaatttacttattaattcagagggtttatcaacaggatatagctcgcaatttacttcattggttatgatatcagcgggcccagttttacaattagaacttatataatatataccttgaacaacaatgtaggtgatatattttggctttgccgataccgttccccacgtatccttctcacttagtatttgttgcatttttttatattcactttttacccttataaagttgatagtgacatctttgactgctctaatttcaggaagtccagagtcaaggatattgaattccttaccctgtataaaagcctttaaagggtggtgtattaccgtaattaatgcaaaagagaatagaacaatgttaatatttctatgtaaattaatttttactttcagagagaacaaacaagagatcaggataaacgtactaaagagataatattcaactggaatagaagagataaattcactggcttcttgttcgtttgtatagaataacgaaagaattgagttgaagtttggtgagccatatgtaagcccgataggggcataaacgagagttactacaccaagaacgataagcaggggtctgtaaaccacagtgactttgtttagcaatagaaaaataaagaatatagcgaatacatacgctatttttaagcgatagcctaaagccatatgagctaaaaggcaaaagatgaagaatgcaacaacgggtaatagcttgattaggtggttttttgtaagtttcatatttatctatcaataggacatcgtgtaatagtaaaacgtggtttagctttcgaaaacaagaaaaacggaggttcaatttcttcatccatccagattttctattagtactatactatgtatttttcgctatgtgaataaaataaattttagttacgatttaaacccgaatactttacttgcaatataaaagaaaccacataacacagaagtatcatcataacccccagtataggaaaatacacataacatgccaagcgttaatagatcatagtaacaggataaagtaaacaaaatagttattaaatatatgggcggattcgactaataagtgcaatttttcagaagggcggtcagttgctatagtaggcatctttctcgccaaaggaaaatgcactatggcctatacacaactgaccgaaacagaaagataccagatttccagtttaaaagaagcgggtttttcacagctttttattgcggagtcacttaaacgaagcccatcgaccatcagcagagaattgaagagaaatcaagaagtccagacatactgccctgaacaggctcatttgaaggtattggcgcgtcgtcattttgctaagaaagccgtgaaaataacgccggaagtaaaaagatggataaaacggttaatttggaaagatttaagccctgaacaggtggctgattatttgaagcaacataaagggatatctttgcatcatgagacgatttatagactgatttatcaagataaaagagaggggggtgatttatggcaacatctgcgaatagccagaaaaccctatcgcaaacgctatggtcgctatgaaagaagaggtaaaattaaaaatcgggtcagtattgatgaacgcccggaaattgttgataaaaaagaacgtattggggactgggaaggagatacgataatagggaaagataaaaaaagtgtcttattaacattggttgaccgcaagacgctgtatacaataatcgttaaacttgatagcaagcaggcatcagaagtcgcgaaagcggcagtgaaagtattatacccgttaaaacaaagggttaagaccatcacgttcgataacggtttggagttcgcagatcatgaaatcatcggtgaagaattagaaacccaaatttactttgctcacccttactcgccttgggaaagagggatcaatgagaatatcaatggactcatcagacaatactttccaaagggaacggattttaatgaagtctctgatcaggaaataaattttgtggtaaaccgattaaataatcgccctcgaaaaacacggggtgggaaaaccccgaatgaattatttaaaggaatacgaacatgtttacttccagattaacgatgttgcacttattatgtgaatctaccatgtgtggttaaattttaccgtatttattcctattgaatatcttggaaaactgacttatcaagaatcgctgtgaattaatgagctataaccgatcctgtgcccctgtaattcaaattgtgcacttttcaatagaagacgtaattgttatatttcagtatttttctcaccaaaggaaagtgcattataaaatgcacacaattgaccagtgaaagaagataaaattcttaaatgaattttatacgatgataattttttaatgcaaaagtataaagcttattaacagtctaaaatggcctgtttttataggccatttagattgttgtcatgactatctaaaaattaaattctgtcttttcttttagtcagtaataaattagccaacaaccaaattattttatttttagacttaattattttcagcctaaataaaaacttatttctcttccgaataaattcagcatcttgtctttgataagaaaaatcggataaaaaagaagaaagctcatcaaatcttttggatgctagcattttccacattagctggccttttaggcttaaagcttttgatttaacttttctcataaaggtttcacgatcttcgttatggtattgcgtgtccatatcttgataaatcttgtcccaagcttggatttcatctatataattctttacatcccacctcttattcatgatggaatcacttcggtaaatataattataaagatattctgggatgtaagaaaacttcgctttacagatacataacaaaataaatgaaatatcttctcctacaattaggttttcatcaaaccaaattttattttctaacaaaaaattacgttttattaacatacaacaaatgccaaaataatcaaaattcaaaaaattgaatgccagattatttaaatctcgataatctttagaacaaatctctttgtctgtataaacattcttgaacaaacaaaaagtaatatcactctttgtctcaccattttttcgcaacactgattcaataaacgaaggctcaaaagagtcatcactatctaggaaagtgacataatcccctttagctttacttaagccaacgtttcttgctgcggaaatccctctgttttcttgagaaaacacctcaatattgaagtattgttcagacagccggttaagaacatccattgtgccatcagttgatccatcgttgacaatgatgatctcagtgtttttatatgtctgattaagaacactattaatagcattttctataatatcttcgacattaaaggccgggatgataattgaaactaatacatcattattcataatagtacaatccgctagttacctacaggaatcctttagaattattcaataaagagctttcaatactaaatatatattctgatataagtacatgtgtgaattgaaccaacatcagtattcctgctcctaattgtcaaatttaaagacatttaattgattatcaatatgattgatatggggtattatactgctttcctcccattaattgtatcaattaatgactaaggtgaagatttactgtgaaaaatgttctctacctagtaacattattactcgctcactaatagaatcagtcctgtactatcacacttccagaatctttttatagcttttaagctgagtttttgccgttatatctaattagccttagttttacacagttaagaatgtgattttttgtaggttggtaattgtcgcaaaattaaaaaaactatcagaatctagatttacagtagaacgaaaaaatttcccgtataaaaaatcagtatatttttcactatgtaaagttaattacacaatgtaattataatgtttatattgattaccgtaaaaattacacagaataaaaatataatgaaaatatttatcattataaatctcactgagcattcccgcaactcatcgataagaaatgaagttcattcaacagtaaacgagctagatatacaaaaagaaaacataaaattttaacaactttgcgtttgatgtttttgcgtgtatttgttcgttcatgggtgaagaaagtcaggcataattttttatgattatagacacaattaagagttgtataactatgatttgcaaaatagtgtttttatttagctcatcttttaaagttcttttgttattcaacatcgtattgtgccaaactttctttgtcacgattattaatatgcctctgctttccggaaaactcagataaatcaacgttgataacaaaccagttatcaatgtattgatattctgcgttttttgcataaaccagatagccagcatcctgaatatgttcaactgcgctattattcgcgaccatatcttctactgttaacaagatagcctcacgtgccattatcgcaatgtcttctttattatccgcggcagaaaaacagccataatcttcggcacacagcgcaggaatgaccaaaccatacgctgtattttcatttttcgataactcaacacctactgaaaaaaacatgatgacctccaaagtcgacggggattaaactctcaccattttctttatagatttgacaatactgataggctgatattttttgggatgcggaaccgagtatgtctttccggttattggtaactccttctaagttcgcgtccaacagcaatcagctcttttattaggttggttgatttcatatcctcccaacctgacataagcatatgcacgcatacacacaaagtaaatttatttatctcaaatgaacttgcgttaaaacgcaaagtgaggctaatttttctgtatgtttttcacccgattattgttcgtaattccatcgcggttaatatgtttctttctcaatcattattttggttatttattgacactcagatctgcccaatttttaccatattgagtcccattgaatgcctttaaaagctgctttgacaaagattgctgtcagttaatgaactacagaaagccttggtttaacagaaaccgtcaatctggcgaaaagtgccgtgccgaatagccggaaagttaatggcaaggtgctgagtggggatgtcaatattacctctcaagatatctttaatgggcaagcaatatcgatccctgacaaagccgatttaaatgattatcaaacgccagggctttattatcagggtttaaatgtacaagcgacagccggtaaaaactaccccgaagcatccgctggttctcttgttgttttacaggctgctggcactattcaacgttattttgtctataatagcagtcggatatatacacgggctttatacccgtggagcggtccgggatggacaccttgggcacaagaatataacacacagaataaacctattgccggggatgtgggggcgtatccaaaatctggtggtattgtaaacgggaatgtggatgcaaccggatatatttccggtaaaggagtgtatgaggctccaggtgttcgggtatatagttcaatgaataaaccttctccgggagaactcggtgcatataccacaggtgaatgcgataatcgctacgctttgaagaacgatgttggggtgattaatttacgacttggaagttgggtaacagagggtgggtggacagacgagacaaaagattggtctgctccttctgggcatgtccttgttggcttgggtacagtaatgtggagttcaggaagacagcaccttgccagtgtacattatcgtcctgtacaagcatacataaatggtatttgggtaacaatctcctcgatctagggtgacattatgaaaactggtatttttacgccttatattccgaaagatgccatatcttgtgttcaatacttaagagatgatgaaggtaatgactggtatcagattcaagaaaaatttttagaagaaactatcaaattcacatttaataaagatggcgttatcacttcaatatcaaaggatatatctagtctattccctatccatttatccgttgctgaacttgcaccagaagatgtaccaactgagataattatcacagatgggtggttttttgacggtgagaaaatcatcaagcgcatttatacattggaagaacaacgacaacaggaaaagaaccagaagtcagaaaaaatgattgctgcaaatgaggtaattcagcctttgcaggatgctattgatttaggaatagcaactaataaggaaaaagccttattactcgaatggaaaaggtatcgagtgtcactgaatcgcattgatacttcattagcatcagaaattatctggcctgaacaaccaaaataaaatgaacgacggcctgctctccaggccgtaaatttttagatttaagaattacgaacagaactataggtacttatcgtttctgaaaccatttttctcacatcaaactcattaaccgctttttctctagctttttcagacaattcttttaattcctgagatgataaactagcaatcaaatttaaaacgttatgtattgatgtttcatcccttgcttttgtgatccagccattgacaccatgatcaacattttctggtaatcccccgaaatcactgacaataacaggtaaactgcaagccatcatttctctgcaagcaaaactgatagtttcacaatcagtggataaaacaaaccctatagaagcattttccatataattaataatttctttatcatcattaatataaccagtaaattcaatatcgacgtgagagaaaggagcacccactaatttatttatatcttcttggcgaggaatgcgtccaataatttttatacgaaatttatcagatagctctttattttttgccaagcatcttatcaaaaaatgccaccctttgtgttcagcggttccagcagaagaaataagtgttatttttcctttttctataactggatgttcagttttccatttatcagtatcaataccattttttatagtaacaacttgtttatcagagataaaagaggagcattgatttctagtggaatcacttacgaaaataattctttcattgaattttttcagcctgattttggataaccaagatacaggataatgattatgttttgtatagattattttgcatttcatcccgaaaagtatttttgcgaggatagcgattttgttgtcagaagttccattagtatgaattatgtctattttttgtcttctggcaatttgtgataaaatcttacaggttattacgagttgttttagcttattaagcttgcagaaaaagtaaagaggaataacattattaaatccggaattggtaagttctttgtataatctgctttcaggtggacaagcaatcagcagctttcctttattataatcaaaatatttaactatattcatgatatatgtggtatgaccgccgccattccctgtatggaaatttgttatcataatattcattgctcacctactcttatctttgtcatgagttaattttatctagaaatcaaaaccaacatagatcttatttatatttctcataatataaaaattcattcaggaattttatcttccggtaatgagctatatttcatgaccttattactaaagttcagaacatcatcttgattttcacatatttcattagacaacattttacaattctcaggtattgtagactctttaatacctgtccaatctgaaaatagtgttaagaaattcattgaattgcgttgaacattaataatattacgtgacgtatcatcgtaagatgtaataaacataggaacctgataatcttgcttatatttatcattatgagcaagcctcatcttcttactatctttctcaaagaaagaaactccgtgatcagcaaaatacatcaaagaccaattcttctcatttttctgtgcttcatcagtaattattgataacaagtcatcggtattttcaatactctgtatatagcaagaaacctgttctgacttaaagaataccttgtattcataatttgttctggtacaagagggggagtgagaacccattaaatggataacaattagcttcttttctctcttatcctctaaggcttttttcacaattggtattatatctgtgtcaggaatatttctgttaagaccagaactagattcaccttttttgataaataatggagaatcagcccttgctcccatgctggcaaccggagtatcaaatatccccatagaaccttgatttgatatccagtaggtataaaagcccgctttttttgctaatgtaacaatattgttgcttaaaatatttttaccatctttgaccattgctagtgagtttgccaatgatatctgggttgatggacctactgagatataatttgtaaaaagtgtcccattggcagtgctcataaaaggtgtattatgtatcggaaatccatacacattcataaaatctctacgtacactttctccaatcacaacaatataagtgctatattttgattttgccgacaccgttccccacgtatcatgttcactgagtatttgttgcattttttcatattcgctttttacccttataaagttgatagtgacatctttgacagccctaatttcaggaagtccagagtcgagaatattgaactcttcaccctgtataaaagattttaaaggatggtgtattactgtaattaatgcaaaagaaaatagaaaaacactaatatttctatgtaaattaacatttacttttagagataataaacnaaagatcaggataagcgcactaaagagataatattcaactggaatagaagagataaactcactagcttcttgtttatttgtatagaataacgaaagaattgaatttaagtttggtgatccgtatgtaagcccgataggggcataaacgagagttgctataccaagaatgataagcaggggcctataaaccactgtggccttgtttagcaatagaaaaataaagaatatagcgaatacatacgctatttttaagcgataacctaaagccatatgagctaaaaggcaaaagatgaagagtgcaacaacgggtagtagcttgattaggtggttttttgtaagtttcatatttatctatcaatagaacatcgtgtagtagtaaaacgtaatgtagctttcggaaaacaagaaaaatggagattcaattttttcatccatccagattttctattagtactatactatgtatttttcatcatgtgaacaaaataaatcttagctacaatgcaaagcagaatactttattcataatataaatggcccctataacatagaagcatcactaaaactccccaatatagaaaaatacaagtaataccatatgatgaaaactatgctattagaacttgaccatcaagacggtaacttattagtctaatctgcctttataaaaaatgcgtcaccgaaattttagcaattcaaatgacatgtgagatttctgacttcgattgtcattgggctgcataagcagcccttattgttgtcattctggcatctcaggccacttaatatcaggggccaatgaagtatcaacacggttcagcaataccagatactttttccattcaagtaacagtgtctgttcctcttccgaagccaattcagtatcaacggcatattgtagcaacgtaatggtttcattagattgtgtacacagcgtgtcgcgcagttgttctgcctgctcaatctcactatcctttattgccactttgtcagtcacccactttgagccatcccatcgatcaaaatgagtagccggttgttcgaatgtcagggttttgggtagttcacccagatcagtaatttcttgcggtaagcgagtttgtgtgttgtaagctgtttttccacggtaatcggggacaatttcccagtgctctccgtctgccgtgcgcctgacagccagagaatcggagtcaggaagtgtcggagcatttgtataggaactggccggtatgccaactcccttcatcagatattctggtgtcacgccgataaattcccttgaatgaggtgctgcatggtagattgtcagccagcccgctttttctgccaatccatctttacctaagattgccgtttccggttctaaagaatatttttgttctgtcattatgctgctctcactatgtagttaaatgcaatattgcgggggcgggtttcatttacagttgttccgattactccgccagtcgatatgttttgatctagtgaacgtgtatatgtactgtttttctcggttccccacgattgatttcccgcaagtacaaggtcttcaacgacttgttttgaaatcaccttatagtgcatatgatcttgaatccctgctggctgccaagacaacattccgcgtcccatatctacccctcggctgtcatcccaaccacggataaattcaccgcgtaaatctggcagtattcctgacggataagctatggctagttgggggtatctagatttatcaaatgcttgaccattacacgtaagatagcctgcgggtgtataacgggatggatacggaagtgggacgccgactggcgcagttatatcatcaattgtcgctaatataccgcttttattaggaaaattaatgagataaatattattacccgcgacattcctcttatataaataaatagattgcgtattatcatttgtcagatctgcttcaatcgcaaagaatccacgagattctttacccaatggtgggaagaaattgattcgcggatatatgctcttagtattaacaatttcaacatttccacgtgcaaaattagcatcaacaaagctttgttgcgctgaatttttcgccagattgacggtttctgttaaaccaaggttttatagaatttataaattaacaataaatcgtgttgaagcagtgtgctggggcattaaatggggattgaaagggtaaaaactgggtatatctgtgtgttaataaatgaccaaaatgacgattatggggaacagaattgcaaatggtttaattgtgaacagctattgttcataaaataacctaaaaatggtcaaagtagagcacatatattggcaaaatgcgtgcctttcccaatcatggtggaaacagattggctatgatctgtattagtcactatttttttctgatttgcgtattctgattctggagatttgttataacgaaataaactgagagttacctgtaatcttgtatgggatttggtaaccatatcaaaacaggtaactctcaattttagataaagtttcaactaacacatccaaatttatttaacggaaagctctatatttacacttcgatttcttacccaataagcttggctgttataacaaatctgtcctccgcaaatagcattttcaactatatcaggacaccctttaatcaatgtataccattcagggccagatccatctgaatttgcatgaccacgaccatgccgaaatgttagtgtataattttctgtgtcggtattggcaacattaatataactaacactccaatcgacagttttagtttcatttgtacatccatctatccagttattattatcct

SEQ ID NO: 5833 - DNA, 5193 bp, Photorhabdus luminescens
ggaatttcgggtcagtcggtaggccgcttcaacatcggcaggagagtcaagagattgcacgagcgattgtcctatatggttagccaacgaacaggccactttcaccaggcggttggtacggcgtttatcacctaattccgcatgttgaaacgtgtcatttgcccattgttcggcgctggttgaaaacataaagattacctcaagtcgtgttttttattgagatcaatctatgagggaaaagttcaataacgcgggggcgggttaaaatatttgtgtaggaaagacaggtgcagcccccgggggcttccctgaacaaaacaaaaccgcgtggtcatgcaaggtcatacgcaaaccgaagccacagtgcctcagagcgtcgcaggggcgccgcttgcgggctctgtgccgcccgcgcccgcagaacgggcacccgccgcccaagcgagttgggcgacgttcgcccgttgccgaaaaaggcgctacactgaccagagcgcggcgggaaaaaccggccttcgggggcgaaaagcgcgtcagggggttttggggccggcggtgaacgcccattggaaaaaacgggtggtaactggctgagggcattgggaaaatcggtgtttggcggtcaacgtcgcaatggaatgggttgttgttgagaataactatctgagcgtgaatgagctggacagttttgcgcatcaagcccgcacctgtgaaggcgaaagctgcaaacaagtgatcaaggatatggtagacactaatatccgcaatcagcaggaaatgatggatttctgcaacagcaacccgacccagtgtgcacagaagtatggttatctggttgatcagtggccggtgtttgaacgtaccctcaaaaatatggaccgggatggcacattgccggttgagttcagaaattacctgtcggcggtgaatacgttaggtcaggcggccacaggcaaggtaggcgaactcggctggacaaaacgctttgaggcgatgggcatgagtcaggagactgccgctgcaatggcgatgacgctgcctattgtgatggagggagccaaagggccgaagtcgtcaccaaaatcatcgcaaaataatgccggcaaagatgctcagcctgagttagcagggaaaaacacaagtggtgcggaaaatgcggcaacttatccgaagttaaaagaagacttggtgcaacgaaacctcagtcatattgcttcgcaagatccaaggttggcggctgtagttaaaggtgataatggtaagctcaattatggcattggcactggaactcgaacagaagcggatagattaggcaaaatctgggtaggagatggagccaagaagactaccggaaatggctgggttagtgcggatggtacgagaggttataggccgccatcagagaaacctaatagtgcccatgccactactggtgtgcaagccaactttgaaacttattccattgattctaaaggaaaaataaataagactggaaacggtcatttaaatattctggattaaaagaggatgcattagtgaaagcagtactaaaaggcatagattgtatgcataaagatccagttatgtactccggtgaagatgacggaactattaatataaccttatccctattaatcgggccagagttggaaagtgggagtgaatattttgatctttttatctgtacacctgaatggctgtgtaatcatcattggcagccggaattgatacgtcatacgcttctggtacgtgagtataatttggatgaaattaaaaagaccattacaaactatatcgatcagtgcgaggggcaagattggatggagatagcgcaaaagctatctcgtgtctttgcctgggaatatgaggattatcaaccttaacctgttgttatccaaagggtccagctaaaaaactggactcttcctttagccgtcagtcattctcagccagttgaatgattaactgcccggcttcgctggtaatagtgatcggcttccctgtggtaaagcccaacgcagccaaccagcgccccttaatggtgagctgcgggtacggattgggcttgccccggttaggccggtagcccacggtgtaatgccgtggctttacagcctgcactttagttgtaatggtttttgctttagaatcgcatttagccatgatgaactacctctgatagttggtgatggttagcggcgctggagtgttcccgcacttcagcgccgtgctgtgttaactctcttccttcgctgttgttgaaatacaggccattgtgccggcaatctgagttttgatgatcattgcatccagcaactccttaataacctcctgctcatactgcggcatacgagaaattgcctcaaattgatagcgcagccgctcactaggaccgcgctcctgttcatcaaaaaccagcatatccgcactgacaccgagcgaaatagccaagcgacgtattacctctaaggtaggttgtgctgagcctccctcataacgccggatctgtaaaactgccacaccagccatatcagccagcgcctgctgagtgagcccgcgttccttgcgtaatgtggtaagccgttcagggaactgcatatcgagaaaccaggttgttgaacttgatatcactatatatcccccttttaaaaagcttgtttttagatatcttatcagatatgttttaaatatcaatatagcatcttgacaggtttttacaggaggtcattgatgacccgcgttcccgacaccgatttagtccacttaaagcaaaccgtctcgttactggggctggcgcgtaagcaaggccgtccgatgaaaaaacgcggtgaggattatgtgctgcgctgtccgttccataacgagaaaacgccctcaatggtgatatcgccggctaagaacctgtatcactgctttggctgtggcgcagcggggtcggtgctggactgggtgatacaaacggaaggggtgacgctgaaaatcgctatccgccggctgcgggagctggccgggttgccggatatggacaatgcagttgtggctgcttcttctttagccgccctgccggagtcacaggcggcccccctgccgcgcccgaaactggccgacctggacgatgacgggcaggcgctgttgcatcaggtgattgatttttatcatcagcacttactggcgtcaccggaagccaaagcctggctggcacgacgcgggctgaatcaccctgaactggtcaatcactttaagctggggtacgcgggccatcacgggatcggcggttcagcgggcttattaccgtccaagagcagtcaggaaggccagcacctgcgcgacaagctgtcggggctgggcgtgttgcgtactaccacccggcaggaccacttccggggctgcgtcgtggtgccggtgatcggctgggccgaatcggccagtgtggccagccgcgggcgggtgctgcaactgtatggccgccgaacccagccggattacaaagtgctgaaagacagcccgaagcatctgtatctgccgtcaccgctagccggggtctggaatgaggcagcgatgaaagccgctgcggaaattatcctgtgcgaagcgttgatcgatgccatgacgttctggtgtgccgggttccgtaacgtgattgccgcgttcggggtgaacgggtttaaccgtgaacatctcgacgcgttgcagtatcacggcgtgaaacgggtgctgattgcctttgaccgggacgaggccggagaccgtggcgtggctaatgtggcggctgatttactggaagccggtatcgaggcatggcgggtgcagttcccgccgggtatggatgccaatgactatgccgtcaaaagcggcaacgccgaacatgcactggggctggcgttgcaacaggcggtctggctgggacagggaaccgcgccgggcgcggtgttcagccatgagcggcccgtctcgccgggtgtgacggaaaagcctcacaatgccgatgtggctaaaccggctgccttagccgccccaccagagctgactgttgcccccgtgccctgtgagcgcacggcctgcggtgaactgctgatgaaaagcgggccacgtatctggcggatacgggggatgaaaaaatcgccggtgcctgatgtgatgaaagtcaatgtgcaggtgcgggatgaaacgtccggcctgttccatgtggatacgctggacatgtatcacgcgcggcatcgtcagaactacatcagcacggcggcgcaagagctggaatgcgagctgtcggtcatcaaacgcgaagccgggcgggtcttgctgatgctggagcagcaacaggacgcgcaacagcaagccgacgccgaagcctcagggacaacggcggtgacggtcagcgcggaagacgaagccgccgcgctggcgttgctaacatcgccgaacctgacagaacagattatcaacgacatggccgcctgtggggtggtcggcgaatccaccaatctgctgaccgggtatctggcggcagtctcgcgcaaactcgataaaccgctggccgtgttaatccagagcagcagcgcggcaggcaagagcagcctgatggatgccgtgctgaacctgatgccggaagaggagcgtatccagtactcggcgatgaccggacagagcctgtattacctcggcgaaaccagcctgcaacacaaaatactggcgatagccgaagaagaaggggtgcggcaggcggcctatgccctgaaactgttgcagtccgacggcgagctgaaaatcgccagcaccggcaagaacgagcagagcggcgaactggtgacgcgggaatacagggtacagggaccggtgatgctgatgttaacgacgacggccattgatgtggatgaagagctgctgaaccgctgtctggtgctgacggtcaacgaatcgcgtgagcagacgcaggctatccacgccatgcagcggcaccgccagacgctggccgggttgctggctgactcggagaaaggctatctgacgcagttacaccagaacgcccagcgcctgttaaggccgctgaaagtggtcaatccttacgcccatcaactgacgttcctgtcagacaaaacccggatgcggcgcgaccacatgaaatacctgacgctgatacaggccattgccctgctgcaccagtatcaacgtgaagtgaagaaaaccacccaccgc
